United States Patent Application Publication US 2007/0277267 A1 - sequence listing, part 6

SEQ ID NO: 34464 - DNA, 381 bp, Glycine max
  unsure at all n locations
agcttcttgttttttgcattaaacgacaagaaaagatactagtatatgaatacatggctaatggaagcctacactcctttatttttggtacgtaatatgaagaatgctttcataattcgattaagtggacttgcatgtttgcttgtttggtttgctttttaattccagtcacaattagcggctctttaatcttgaatatcttatattgaatgaatagcttgctttgtcaaatcacagataaaataaagggtaaatttctggattggcctcgacgcttncacataatatttggaataactcgaggacttctgtatcttcatcaagattctcgattaacgattatccatagagatctcaaagcaagtaacgttttacttgatg

SEQ ID NO: 34465 - DNA, 382 bp, Glycine max
tatcgtaatcgatgtacacaacttggtgttgagacaatgtttgtttcattcaggagtccctgctttaattaattaccatgtgatataatcaattacttctctttctataagtgtttcacaagtgacccaaaacactttaatcgattactttgaggatctaatcgattacattattcttgagaggtttccaagttttgggaagaagactttaatcgattgaaatgataatataattgattacattgtagatttaattgattacaagcagatattacttttttctctctatatacccatcttgtgttctcacttctatgcacaagttcattaagtgccaaaatgcatgagttgatataagcgataagcgacgtgtgatactttc

SEQ ID NO: 34466 - DNA, 347 bp, Glycine max
  unsure at all n locations
atagcaagatgaacagtgacatgaattgctgttgatgcattatcatacaaaaccctgaaaacctgtttaaaaatttattaattggcaatcccttcaattgagagtaatatcaaacataggacagacaattagtatgaaactgctgaagtaatcaatttatgataatacatatggcattagacattcagcaaagttcacgaatcataaaattcccaccagaggaaagtgcaccttctgagccacagctaaagctgcctcgtctcgactaacacatctaagtatgatctcacgaacctcagaaatgacaccctaaacatacgaacncaanacagatattaaaacgtgga

SEQ ID NO: 34467 - DNA, 436 bp, Glycine max
tccatcatgtaaattgcttatatttcttggcaattcctgtctcatgatgagatagattatgtccacatgacgtaacagaatttgcagaatgaaacatggaaccaccagcaacatccttttctatgtacaattctagaactgacatttgttgttgttgttgaaaactttcgatcatagtttcaacatcttcgtcatcacaaatttgcaaggcgacatattttcctaaaactaaaaatctacaacttatagtagaaatgatttcattattttctaactttcccttatctccaattttttttcaaagcattgaaactaattccgcatttaatctgaattacctttttactgccttcaaatattacaccatcattgtcttcatatactcttccgttgaaatacaacactgtaataattgaattcatgatatatctacatc

SEQ ID NO: 34468 - DNA, 367 bp, Glycine max
  unsure at all n locations
taatgacccactaacctagaattaaaataacttaatgccattaacctaaggaattaaaaaaacttaatggctgagtgtaactgaaattgtggcaaccaaaagtcacccccaacagccaacaagtcagccaccatttggtctcccaaaaggctgatgcctacgttgccaattgggcccttattacaacttgaactaaacctaactaaagccattttaattgattaacccaaaacatatttttggtcagccaactttacaaggattgggccattatttatacaaactaaacactctaaaattgaaacaaagtggtgtcatttagtccttcttcatttgngccatgatacaactcacaaccttggacttt

SEQ ID NO: 34469 - DNA, 436 bp, Glycine max
tgccttgccccttgatatatttgagggactcatggtcactatgaatgacaaattccttgggataaaggtagtgttgccatgttttcaaagcccgtactaaggcatacaactccttatcataagttgaatagttaagggtaggaccacttaacttttcactaaaataagcaattggatggccttcttgcatcaacacagccccaatcccaacatttgaagcatcacactcaatttcaaaagatttttgaaagtttggcaacgcaagtatgggggcattagttagcttttgcttaagaacattgaaagcttcttcttgtttctctccccatttgaaaccaacatttttcttgagcacttcattgagaggtgctgccaatgtgctaaaatccttcacaaatcgtctataaaaacttgctaagccatgacaactcctcac

SEQ ID NO: 34470 - DNA, 359 bp, Glycine max
  unsure at all n locations
agcttcttttggaccttgaacaggcaatcaactcctctttcagaaccatgctatgtgctcgcgactggtccctttcttcccttcgcaacttgagttcattattgctaccccatagagctccgcgaaatttgttccggccatactcttccttgcgagccctcttggtctcttgttcaagggctcttgcggtaattgcattctcttcccgtaacccggcaacttgcatattcaataaggaattttgattggtcttcattgtacaatctatctctttcaagagagatttcttcttctcttcttcttacttctgacnagggattaagagaccgagagtctcttgctgtacaggattcctgaca

SEQ ID NO: 34471 - DNA, 425 bp, Glycine max
taattaactaacaacttgttaaaaaaatataataccaatgttgccacgctacagacatattcaacggttaccaatccccattgaagacgcgtgggggaggtttggattgggctccacctattttcttcgatcagctaggaaaagctggaaaaggtcttcatggggctacccatttttgtcttggccttctttgtccatattccaggttttattaattaatgcccccgactaaactcttttaattcaaactattcccgctatctcctaaacctttctccatttgattttgcttcagcatttttctttcactcatacatgcatctgatcatcaagggtatctagttcaattggctgcttaaaatgtgtgaattgttgtaaatcttgatattcgtcttggatttccatagatatcacacaagatacat

SEQ ID NO: 34472 - DNA, 268 bp, Glycine max
agatttctacagagagagagctccaagttccagggagttcgggcttctccttgagcttctacatttgtagagatttctagagagaggtccaagttccacggagtttgggcatttctcgaagcttctgcatgttcacagatttctacagacagaaaggcgcaagtctcagagagttttgagagcttttgctgtgcgaaaactgcccgagaactgagcttgaagagaaagccatcctgacagcatgagatgagtctgtgactgattgcga

SEQ ID NO: 34473 - DNA, 423 bp, Glycine max
  unsure at all n locations
ctgttgcgaaggtgcccaaaccgtaactttgatgatgctgcacaactgcatatcttttatagtggttcgaaacctcaaaccaagatgatccttgatgcctcagctggaggcactatgatgtccaagagttcggaggaagctattaatgtaatctccattggagcttgtaggactaggatattcttcatcaatggattcctttgcttcttggaagatgaatgtcagcggaatggagaaggaagagagagaggagacgccacttcaaggagaagatgagtctagaagaagctcaccaccataagaggccatggataacagcgtggaggaagaacgagatgaatgaagggagagggagagaagagcacgatattttgcgctcataaagagctctgaaatctgaagtttaatattcanatgatcaaa

SEQ ID NO: 34474 - DNA, 301 bp, Glycine max
agcttgttatttacatgtcccaaccacaacagaagcaacgaaccaactactgacgagccgataacaaaacacaactccctccccaaataatcacaacgtcatgacgctcgcttggcaactcccacaaagaaatccccctttacatcacttactggtgtcatttgctcccacaacaaaggttcggatcatcaacgtacaaccacacggacaaaactcaaagatgacctattctaaacacatcaacaagcgtagatgacgataattcaacgaactatgtcataatataatccactcataatca

SEQ ID NO: 34475 - DNA, 423 bp, Glycine max
  unsure at all n locations
tcataaaaggtgacaaaattgtgttcataacacgtttcatgaattntttcgactctcgtatctttagagaagggaaccaaagtgccgatctcttggcaaattatggtcttcatgcaagtgatcctatttggtgggatcatctcctccttttattttcttaggcttttatttgtaataaaaggtttttttttttaccagaatttaggtcttgttgagtctatttgcatgggttttggttattatagtgtggtatatgattactagattatattggtgtcaacataattgggattagttaatatgttgtgatgttgtgcacttcaataagtttataaaaaaatcattttacattaagatgagtcatctaattattatttataagataaatagccaacatcatctttgaaagtgtgaagtgctaat

SEQ ID NO: 34476 - DNA, 431 bp, Glycine max
  unsure at all n locations
tctgaaggctcaagatacaatgaaaaagtatgttgtctttctttgtagggatgtggcctatcaacccaatgattgggtcctggtgaaactcaaaccccaccgataattaactgccaaaggacctggaacaagttcgggtaaacaggacaagctgttttatggctcattcagagtgatagaacgcattggggcggcggcttatcggctccagttaccagacggtgctaagatacattcagtcttccattgctctctgcttaagccattcaagggttcaccaacacaatctgaaattgcatccttaccagcacaattcattaatggacaacctatgatttctcctctcgctatcctcaatgatcataaggttccaggatcaacaccagactcctgngaagttctcgttcaatggcaaggtatgtcaccagata

SEQ ID NO: 34477 - DNA, 359 bp, Glycine max
  unsure at all n locations
tgtttatatgcattatcattattataccgacacgtttcgaatgaaaggtagagaaagtgtgacagactcacagtgagaaggagagtgagggaaaaaagaagccatgatgataatctgaattgctagctgtggacgcttgggatgggattgaaatgataaattatgggtacgctatcggcaatggatcagcctctccaccaccttctctcaatttgtaatacataatcangaacacgcatttacgattggagtattggacctcttttttcacccgccccaatgaaaacgtggcttggtgcacttgctctttttttaatggacaaaactacgcgctttgttctgattttctatattccgct

SEQ ID NO: 34478 - DNA, 433 bp, Glycine max
  unsure at all n locations
tctatagaaggttcgttcctaatttctctacaattgcattacctctcaatgagctggtgaagaagaatgtggcatttacctgnggtgaaaaacaagatcaagcctttgctttgctcaaagaaaagcttactaaggcacctgttctagctcttcctgacttttctaaaacttttgagctagaatttgatgcctctagagtgggagttggagctgtattgttacaaggtgggcaccctattgcttattttagcgaaaaacttcatagtgccacccttaactaccccacctatgataaagaactttatgccttaataagagccctccaaacttgggaacattaccttgtttccaaggaatttgtcattcatagtgatcatcaatcactaaagtacattagagggcaaagcaagttaaacaagaggcatgcaaaatg

SEQ ID NO: 34479 - DNA, 393 bp, Glycine max
  unsure at all n locations
agcttgtaatcgattacacaaggcttgcaatcgattaccagaagtttttgaacgctctaaaacagcctttagaaatttgaatttaaattttaaagtctgtaatcgattacagaatgtatgtaatcgattaccagagttaaaattcaaatttcaaatgtgaagagtcacaactctgcagaaaacaattgtgtaattgattacaccattttggtagtcgattaccattgaagaattttttaaaataactcccaatagtcacatcttttcaaatgattttgaatggccatcaaaggcctatatatacgtgacttgcgacatgaattttctgagagttcttctgaactganatgtcttatcctctacaaaagattcctcgtctaacacttgatattc

SEQ ID NO: 34480 - DNA, 430 bp, Glycine max
ttgacttgagtcatcaagagattataaatatgtgaccatggcatgagtttcaataatgaccaatcatcaatcatctttgaatcatctatctttcaatcttttttcaacatcatatctcaaacatctttcaatcgatctttcaatatctttctacagaattttctgatttatttctcttcatctttctaaaagttttttatcaacactttctcttccaagaaaagttctttgttcaaaaacttgtgctattcatctttttcattctcttctcccttttccaaaagaatgaaggactaaccgcctgaattcttttgtttctcttttctcccttacaaaagattcaaaggactaaccgcctgagaattcttttgattcttcccttccccttaagcaaaagatttcaaaggactaaccgcctgagatatctttt

SEQ ID NO: 34481 - DNA, 381 bp, Glycine max
agctttactactgtgcaggattaagacattactcattacactttgtcattcatttcaggtctgggatcttggcggacaagaaagactgaggacatcatgggcaacatattaccgaggaacgcatgctgttattgcggtgattgacagcagtgatagagccaggatctctatcataaaggatgaactttctaggttgctggggcatgaagatttacaacattctgtcattcttgtctttgctaataaacaagatatcaaggatgctatgactcctgctgagatcactgatgcactattccttcacagcatcaaggatcatagatggcatatacaagcttgctgtgccctatcaggagaacggttgtatgatggtcttggatg

SEQ ID NO: 34482 - DNA, 390 bp, Glycine max
atgagtgtgtatgatgtacactgatactgtgacttgcctttgtagcactctgatcgaatatagttgagtccacctgtctcaaactcagcttaataatagtcgattagcttcagttactacttagtgggatctgctaagccgcatataaattaatgcttaaattaggaataactggatttaagttcactgataatcctagtttaggtgcataaactatgtatggtaattggtgagttcagagtacatgagcaaaacgttaaataaaagtaagtcatactaaaagtattaaacaattgtgtagtgaagttaacctatttcacctttcactaatcaaactttaatccagcttcagattttgagctataagtggtgcttcaaggataagtcaat

SEQ ID NO: 34483 - DNA, 141 bp, Glycine max
  unsure at all n locations
agttttctagttgagtgataagccaancagcctagggaatgacgcattaaaatattcatgctcgcccgaatgattgcgcatgggagagacattagctacgcgcaatgcctatatgacctatgagtgaggcttaacgagcct

SEQ ID NO: 34484 - DNA, 373 bp, Glycine max
ttcaaaatatggctgcagcttttggcttttccaaacttgcaggtactactatatttattgtattctagtgtcaagaatctcataattaaatattttctcatcttatgccacatatataactaatggggatggtcatttgtatttggtaataagactcaacaggtgtggcaaaagttgtaggttaaggtggacgaactacttgaggcctgatattaaaagagggaaattttcccaagaagaagaacaaacaattctggatctccatgctgtccttggaaacaagtaaatattcaacaccactatagcacctactatttaatgtgttttgatgttaattatatccttaattaaaagactgctcattattatggat

SEQ ID NO: 34485 - DNA, 444 bp, Glycine max
  unsure at all n locations
agcttataattacatttttgcctcaatcatttccaaatatgcatgtgaattaagacgcatcagcaagaatcaagccaaggctattgtgcaagcaatcaatggggcaaaacacaccaaatgattatgatgatggatggctcaaattctcacaaaggtaaactcatcactttcaaattgagctttcaaaactatcatgacatgtagagaagaatcaaggatttcaagtcacaaaatgtcaagaactcttattgtcaaaacaataacccatttcttgaacatatcctataattcatagaanaacatgcatagtcgcacgtgcacaaaaaattgacccaacatatgaaactaaaaatccgacgaaactgacaacattaacaaattaacagattaacaaaactagcagacacaaagaacactcccgcgcccccatacttaaacaacaca

SEQ ID NO: 34486 - DNA, 417 bp, Glycine max
  unsure at all n locations
tgcctgtccgatgcagcagtaatgatggcccgagttatgttgtgtgaacggttacgaacccggaatgggtttaggcaaagacaacggcggcattactagcctgataaatgccaaaggaaatcgtgggaagtatgggttaggctataagcccactcaggcagatataaagagaagcatcgtgggaaggaagagcggtagtcaaagctcgcggttgagacaagaaggtgaaggaagcccaccctgccacataagtagcagctttataagcgcgggtctgggggatgaaggtcaagtggtcgtgatatacgaagatgatgttccgagtacattggatttggtacgaccatgccttcctgatttccagctgggaaattggcaagtggaggaatgccncagcatttacgcaacgagcataat

SEQ ID NO: 34487 - DNA, 438 bp, Glycine max
  unsure at all n locations
agtttgtaatttattttatgaaagccattcaataatatctaaccattttccaatcgtgtttatgcatccatatacaatacatgtgtcctgatattccttaattgcttattgactacaagtctacaacgtcaaccacatacattttccttcgatcccttccatccaaaggaaacaaaacataaaagtgaaggcataaacaagaacggaaatggctctacaacaataattctatatttacgtacaagcaaagaatgcaacatcatcacgaatgtattacttggacgtgaactaactcaaaaacaatagtgctagaaccagattanagctatgtacgtcatgatgaagaagaaattatatatgatatgatatcatgcgttatgggcacagaagatcgttgcctggcccaccataatataagcatgtgccacattattacta

SEQ ID NO: 34488 - DNA, 430 bp, Glycine max
tatggaaatatataatgctagtggctatcactacctttataatttatgttcaaaaatctactcctctcagtttagagatgatgatgaaacttgaaagttgcgaccatcttatatcatcaattcatttttttattgggaaaaatttaagtgagttggattcgagagaactcattaggattagaagagactcaagactaaaaaacgcttacaaattactcaccaaacaaggttctaatatcaaaagcgaaaatcgaactcacgtttttgtgggatatgagtttcttccttaccaattggaccacaatctgttggcttatatcatctattcataaacctatggcaatcgctccactaattggtgcataaaaagtgtataaaaaagaaagttcggataagatagagcaacaaacacggtgccgacacttcttaa

SEQ ID NO: 34489 - DNA, 436 bp, Glycine max
agtttgatgttgacacaaaagtctaatatgtttgatgcacctttcaaatacatggtgcctgaagatgtcagtaatcatgctatggccatcttaaccaatttttttttttttgcaatctgcttatagctgattttattttgattcttttgtttctagaaggaaattcccgacagacctttgccatcacattggactccttctatgcaggtgaaaaacatattctggtttgaactttgatccaatttgtgttggtatcttgatcatgcacacttgtgtttgtcatacataaaaaggttgactctgtacatctctcttttaaataggcatataacacttgtgggtctactccaactccctttttaaatcaacaggcagctggttctcacatgcctctctacatgtgggtaaatcatgtactgatatacataccattgcc

SEQ ID NO: 34490 - DNA, 435 bp, Glycine max
tgcagcacactagcaaacgtagaattatttggaacattagatgtttgcctcattcgacaaaacaactccaaagcctccctacttttatcactctgagcataccgcgctatcatgagactccaaggaataagatcatctttcggcatttcttcaaaaaactgctgcgtctcagcaatctctccagacttggttaacaattcaagcagcacagtgccaacataaagatccctatcataacacgctttcaaagcacatccatgaacacttttcccaacctcaaaattgttcggtctaaaccccataaccctcatctggcagaaaagtagcaacgaatcttcatggcagtaattctcagcatagcaagccatcatcccagtccaagataccatgcccttacaacaaatcccatcataaacttggcacgcagcgataaca

SEQ ID NO: 34491 - DNA, 441 bp, Glycine max
  unsure at all n locations
agcttgtcttgcaccttttgtggaatcctttaaccagaatacctttatctttttccctaaattattaatgaataaattgcttgttgttttgagattaaatgattgtttctttttggccagtctcttaaattattttcttattgaattttttcttttgggcatcattcagctcacttttggcatcccaggctcatagaggaacttaatttaatttgtttgtcagagtatagttaagtttgcacctacatgttttactttaaatcttatgcaccttgatgggaattataactatttaatttgctttatggttatttcctattgaaaattattgtacattccctttaacagcttatcatgtcttttcttaacggtatattcatttgttgcgggcctgcgatgtggnggtgtattctacgtgatggaaattcttgtccatgatct

SEQ ID NO: 34492 - DNA, 431 bp, Glycine max
  unsure at all n locations
tgataatttccacatctaaaatggtggaacttgaggtttgccaagtgctatcaattgctagcttcgtgttcttgctcatggaagtgatagggaaggtagaggaattggtgaaagaggtggaggagctcgaagacattgctggttttcgcaccaccacaacttcattgtcttcgtagaacccatctttgtatacaatgatattatgtaaaaaccacttcccaattttgggtcatgagttagaaatatgtgttttcttggtaccaaaaaaaaaaacacatttttaattagaaatatgaatttgagtgtatcatccaaagtatagtaattgaggtcagatgcaattaggtatttaactgtgtttgtattaatgaaaatganaacattactgaagtgtcataaccggtaaactgaacctagacgcaacttttcca

SEQ ID NO: 34493 - DNA, 424 bp, Glycine max
  unsure at all n locations
agtttgggctaagcgagtcagtctcgctaagcccaaagcaatttagttttccgagtttttgttcatgcgctaagcgagttagtctcgctaagcgcaatttcttctttatttttgaattaggcttagtgagcttgctcgctaagccaatcatgttccagtggtcaagtttggctaaacgcttgctggcgctaagcctgtgtagtgtgtcgtgctaagcaagtcagtctcgctaagcgcaattagctctctgtgagagaataaggcttagcgagccatgctcgcttagccattgtgttcgtttagctaagcgagtatgtctctcttagccagagtctatngttttgtgttgtcgcgctaagcgcgccttgcgcgctaagcttgagctggtaatttcataaagcacgctaagcgagatagtctcgct

SEQ ID NO: 34494 - DNA, 418 bp, Glycine max
  unsure at all n locations
tgcttgtggggcttctatgaaggctggatctttgagtcttaatggggtcctttaatggtgattttcctccatggagatgcagcggaagacaaaggagaagaggtgagaggaggtgccatccactatggaataagccatggaagaaggagcttcaccaccaagatgagccttggataaaaagcttggagaggatgcttcaatggaggaaaagaaagatggagagaaagagaggggggtgggggagcacgaaattgaaggaagaaaagagggagagaagttgaactttgagttgtgtctcacaagactctcattcatcaaagttacaacaagtgttacacatgcttctatttatagactangtagcttccttgagaagttttcttgagaaaacttccttgagaagcttctttgagaaaac

SEQ ID NO: 34495 - DNA, 534 bp, Glycine max
  unsure at all n locations
ntgactttgagttgtcgagtngcacnncacnngnaaccggcacccgcgcaagcagaccagctagaangcaactcttcgcatttcagttgtttccccgcgccacacaacaagatcacactgtgttgaagatcagtcaacacacgacggcagaactgaggcctgtatggtatacgatgcacggctacacaattgggcgcaaaaaccacacccaacagatgtctcattgatgcgctcgcgataaatactccccatcgtaactcaccactgttcaattgaacctctcaacccatacagacctggcctcaaaaagcacagatttcaagtcacccaatgccaatgacatcgatgtccagtacatgtaatcgattaccgaagcacacgaataagtgtaataagatacacataatactgacccgactaccagagattcccaacgctgggactttaaatcatcgctgcgtgacccttcacacacaccgaatcacctaactgggacactatcagaatacctcgccctctccatcatttcaaacg

SEQ ID NO: 34496 - DNA, 434 bp, Glycine max
  unsure at all n locations
agcttgaagtgatctctattctgatgtgtgtggtccttttgaagtgaaatctctaggaggtaacagttactttatgtcattcattgatgaatttactagaaaaatgtggacctatctcattaagcagaaaagtgaagtgtttaacatttttaagaagtttaagctgtcgagtgaaaaacaaagtgtagatgcaattggctttgatgttttgatgatgatcatgatgatgtgttgcaattgatgcaaatgggcttttcaagattaaaattcaagacaatacttcaagattacaaggcacaacatcaagatgatcactagaatattangaagggaattcctaattgaattagcaaaggtttggccaagtgatttacaataaaaagtgtttttcacagcttttactctctggtaatcgattaccagacgatgtaatc

SEQ ID NO: 34497 - DNA, 419 bp, Glycine max
  unsure at all n locations
tgtattttcatcaactctggagaacatgttcataatttcctttcaaaattgtattctatagagtccaacaagcatgcaataggaatgcaaggtgtggtattgtattccaaatcaaaggattcatctatgttactcactcatggtcgagtaaaacaatatctgttgagtgaaaatgtaattcaattgtccaagatataaacttcttcctgaaagcattgtatgaaggaaaaattagcaatcaaaaaatgaagcattcttataatctacatctccatctggcatcaatgtgttaaaaagaaatcatcacaacttgataaaaaccttataacaagagccccgcatatccactttgtatatcacgtatatggtatataccaaaagatcaaaattaaacaaggaaacagtaatgaanaaagtac

SEQ ID NO: 34498 - DNA, 386 bp, Glycine max
agctttgagccaaaatcctaactcaccataaaccttgacccagggtgagaatgtcaatccttaccctcggaagcaaaaaagaagagaaggaaaatttccaatcaaagaaaaaaaagagaaggaaaatttccaatcaaagagaaagcaaaaaaaggagagaaggaaaatttccaatcaaaggaaaaaagagaggaaaggaaattcccaatcaaagagtgggagaaagagaaaagaaaagaaagataattcccaaccaaagagtgggagaaagtaaaaggaaggaaagacagctcctgatcaaggatcgaaagatatcagaagacatgtgcaaaaaggtctttggaccggacaatatctgtacaatacagaattgtcaccaaatgaac

SEQ ID NO: 34499 - DNA, 241 bp, Glycine max
  unsure at all n locations
ntacatgcttgagcggactcgttcagtgttccatttgtttgaacggcgctgccttcctcatcttctcatccctatttctctttcaaccacctgtacacttccagcgatgttgatttactgtggggcacacattacaaaccgaagtagaagacctcagctagctttgtgtcaacctttgatagaaacctcattcggtcagctcgtgtgtagaacgctatggactccaccatagtcttcctct

SEQ ID NO: 34500 - DNA, 430 bp, Glycine max
  unsure at all n locations
agcttgccacaccatcgcgattctaacccaaaccccttccgggctcgtacttgtgccctaacatcacgcgggctaccatcaaagcggcgctagacgagcgtggttgcaccggggagactcaacataggcgttgcttaccacttacaaagcttggaaggacgtctctaaggattcttcgacggcttccacatatggtgtagaagagggacaactcacaacgatgtcttcctccccggagactatgattagctacccttctaccacaaacttcaatatttggtggagcattgaagggactaccccgactgagtgaatccaaggccggcctanaaggcagctataggccgggttgatatccatcacttggaacatgatatgacagatgtgcggtccaatctgaattgggagatcaatctcgccctttacgtct

SEQ ID NO: 34501 - DNA, 427 bp, Glycine max
  unsure at all n locations
ttaaatggagctacattagttgtttcactttcattttccaatctaggtaggcctcaacattatatttatatggaaatatgggaggctaatgctaacctcttgagaccttttatccttttctcttctttgggagcgaggtcttgtatggaacctatgcctccctccatagtagtcacttaactcttcactcaaacttttacaagtctcatgactaccataggaagcatttctgcctcttcttaattctttcattaattttcttctttcttcctctcttattttctctctttcatcttgtcttatttcttccactcttttgttaccttttcttttctctcttgtttttctttccacaacttaagggatctcaactcatctaatatcttatacaaggggtccttangagtagaaccctcaccattaatgc

SEQ ID NO: 34502 - DNA, 428 bp, Glycine max
  unsure at all n locations
agttttgatggtgtcgagaagaaatcacatgtttgtcatcatcaaaaagggggagaatgtgaatgtatgtatacatgattttgatgatgtcaaaagaagaatcaaacaaggctcattttgcttcaagattaatacaagattttttcaacaaacaaagccttgattcaatatttcttcaagatcaagccttgcctcaaaatgtagagatttcaagtcatccaaggcacatgtaatcgattaccaatacatgtaatcgattaccaaggcacatgaaagtgtgtaatcgattacacatcatatgtaatcgattaccagagactctgaacgttgggaattcanattataactgtgtaatcgattacacaaacattgtaatcgattaccagtggaaagttttcagaaaatctgccaacagtcacatcttttca

SEQ ID NO: 34503 - DNA, 414 bp, Glycine max
  unsure at all n locations
tgtctcagcggtnatgcgagtattagacctacatgctagctatcatcgccaagtaccaagaagagttaggtctagccgcggcccacgagcataggattgcggacgaatatgcccaagtatacgcggaaaaagaggctagaggaagggtgatcgactctttacaccaagaggcaaccatgtggatggaccggtttgctcttaccttgaacgggagtcaagaacttccccgattgttagccaaggccaaggcgatggcagacacctactccacccccgaagagattcatgggcttctcggctattgtcagcatatgatagacttaatggcccacataattagaaatcgttaggacacttgtatggtctctcagaccttgactagatacgacttcccttttgaaatanaatgagttg

SEQ ID NO: 34504 - DNA, 427 bp, Glycine max
ttcaagacgacgaatcaagtcgcaccaagccgctctgatgaccacaaacacgacgaccaaaagcccaacagaatgatgccaagaccgactcaacacgcgcaagaacaagaacaacctcaagcttcatgacaagaaatcaagacgttggatatcaagactcacgagacgacgaactcaagaatcaggagaatacatcaagaagactccaccagggacgtaccgaaaaaaatcctcaaaaaacaaacatagcacagctccgcgtctaaaaccgggcccacacaattgactaaggtactagacgactcactctctgggaaacgaataccatcgacctggaatcgactaccacgggccaagcttgaggcccaaagcttctaaccgaacgggcaatggctcactacgacgttaacgggcgccaccgaccccg

SEQ ID NO: 34505 - DNA, 367 bp, Glycine max
agcttgcaattgtcctttcactatggagggcattactaatcagcttgagcatataatatgcgagagatgaggcctccaagctccaacaatgttcgactggtcgcagcgaaggacaccatcatacatgccatcaagatcatttttcttgtctgaataataccttgttgatgcttacagggctggtctgcaggaagaatatgctggccaagtctgtttattcaagccaaaaatcatgacataagctcggcacatatacaagatatcacactgcaatggaaggctgagaggaatatgttgactaacaacacgagttacatggctgctgacaatgttaacatagcagcaagtacacaagatcagtggaagt

SEQ ID NO: 34506 - DNA, 431 bp, Glycine max
tctattattaacagtttagttctagtgcactgaactttgtttattagcagtttgattaataaaacttaaaacagtttaggtttagttttttataaaataattcagtttttaatagtttaattcattttggtattaaagtagttcacagatcaaaataattttttggacacccctaaatactttccatttgataatggcataatatatgggagaatttacataactcatgaatgatacttactaggcctactgcaatgtcaaggtgatacttgcgtcctgtagtgtgcactgctccaccacgactagaagtccggttaaaattatcatttatcacatcacctactaggaatttagaagacactcagtataaatgctaaaagaggaagttaaatgatatgaagataacaaattagatgatctaaaacgaagca

SEQ ID NO: 34507 - DNA, 429 bp, Glycine max
  unsure at all n locations
gtntttntttttttttttacttttaaaagntccttctttgaagtttttttttaaatggaaaacaaaacaaaagaaaaaaaataaatgaaaatttttgtaaaaaagaaacttataacttcaaaatactaagattaaaaataatatatatatatatatatatatatatatatatatatatatatatatatatatatatatatttgaagtagtaaataaataaaaaattaaattgaagttgtaaaaattttataactttagttaaaaaaaaataataataaattataatagatgttaaatcttttaactcacaccttataatactatttcattttctataataattttagaatcaatcctaaataaaaaaattacacccgtctaatataattgaacagagagggttcacctttctctcactctgtttcacaa

SEQ ID NO: 34508 - DNA, 440 bp, Glycine max
  unsure at all n locations
agtttcttattcaaggcacattcttggtggcgaagctccttcttccatggcttattccctagtggatggtgcctcttctcacctcttttcctttgtcttccgctgaatctccatggtgaaaaatcaccattgaatgaagctcaaagatccagcctccatagaagcttcacaagcaagcttccatcactttctctccctctccctccactcatcttctcctaccttcaagctcttacccatggcttcctatgttggtgagctntttcttgactcatcttttccttgaagtggcgtctccaatcatctttcttccatctccattctgctaccgttaaacttcaagaagcaagggactccattgatgaagatgatccaaggcctatatgctccacattgagttacattacgaaatatacttgtttgacaatgtagacaattac

SEQ ID NO: 34509 - DNA, 431 bp, Glycine max
gtgcggctgacaatatattacagcaccaaggttctattttaggctctcctctcttctctctctccttggtcattttgagctataggcttctcttcttcttttaaacactttttcattatgcaattccagttctaagatttcgttttagcaataaaaattcgttctctattgattaatggaaggctaagtctccagcgctgttttctcttgaggatcaaacacaattctctttgaggctctattattactattaaattctgctcagtttttcctcttcaccaattactctgtatatgttgctatgaattcatgcatgcttagagcttgatgaattgtctatgcacttaatttacgttcatgcttaatgatcgttcatgattaattggtgtatgtgttgcttaatcacataatgaatgccttatgttaaattt

SEQ ID NO: 34510 - DNA, 396 bp, Glycine max
  unsure at all n locations
agcttctggaaggagttctactagatgttctatgcctcttgaaggtggtagtccatgaggaatctccataggaaagacatttttaaattcctgcaataagggttgaacactaggagaaatagaaatagtaaactcattagaattatgagtagaaattttactgtctttgcaatactgtagattgagtggttcatgagcaggtaacattttcctcacttcactcgcctctgcaaaataattaacttttctctcatgtgtatcactctcttcctcgggtgtatcactctttctcatattcctttgtggcgcctcactattttctttctcttgatctctctcttctctcattctgatttgagcatcacacacttctctaggngatagatgtttaagagt

SEQ ID NO: 34511 - DNA, 426 bp, Glycine max
tcagaattcaatttcgagcgtctcaatagattacggttactcaatcagacattcgagcaaaacattattgtcgtttgaattagctcagagcttcagaattcaatttcgatcgtctcgatatattacgggtctcaatcagacatctgagtaaaaaagttattatcgttcgaatttgctgagagcttcaacattcaatttcgagcgtctcgatgttttatgggacttaatcagacatccgagtaaaaagttattgccgtttgaatttgctgagagcttcaacattcaatttcgagcatctcgatatattacgggactcaatcagacatccgagtaaaaagttatcgtcgtttgaatttggtcagagcttcaacattcaatttggagcgtatacatatattacgggactcaatcagacatccgagtaaa

SEQ ID NO: 34512 - DNA, 267 bp, Glycine max
  unsure at all n locations
agatgncagttattcttagaccacagcacgacccattaaccttgaagcaaaacacctcactgccattaacctatggaattaacaaaaacctatcggctgagtgtaactgaaattgcggtaaccaaaagtcacccccaacagtcaacaactcagccaccatttggtctcctaaaaagctgatgcctangttgccaattgggccctcattacaacttgatcacaacctaactaaagcccttctacttgattaaccacacacatattctt

SEQ ID NO: 34513 - DNA, 283 bp, Glycine max
tccgaacccggaacataagatagcgcgacgctcgatatagtacaacggacgtgctcaagaaattccaaaggtcataacttttcactgagaggtccaaatatgcaacataatacatcgagaccctcgaaattgaacaacggaagctctccagaaaaacgaatggtcataactctgcacttggatgttagaatttggaacataatatatcgagacactcgtaatagatcaacggacgctctcagaaattcaaatggtcataacttctcccacggatgtctgaatc

SEQ ID NO: 34514 - DNA, 432 bp, Glycine max
  unsure at all n locations
agcttgcttttgcagtaaagcatgaaagacatgcacaaagtgtgactatatgatgtggcaatagggtgtagtaagcaaatgctcacctccccctctaaaatttaattggattgggcttctaccaattcaattaaatttatttcccaacacacatatcaaatattcacttagtgcatgtgaaattacaaaactacccttaatacaaaaactagtctatgtgccctaaaatacaagagctgaaaaatcctatatttctagggtaccctacctacattatggagccctaaatacaaggaccaaatataatgacatcctagtctaatatgtataaagataattggactcaaccttggcctgtgggctcagacatctaccctgaggatcatgagaaccctanggtcttcttcaccagctatagcccaatcctcttgg

SEQ ID NO: 34515 - DNA, 425 bp, Glycine max
ggacctataaaactcagcttgaggtaatattcttattcggattatggttatagtttttgcaatcatcggagtcaaggtctatgctgcaggtttgtatctagatcaatctgtcacccaggaattgaatgcttggaaagggcaatcaaaagatgctattcaagggaattcttccttgttcgagaccattttccaatgtaacaactttatattcagttttttatttctacaatgctctttgcaaagaggcatgctcagaataatttgataaacatatatgcctttatatgattgcagcttcctttgagaaatcattgcaaattgttcttgtcagagatgttgatggtaaaactttttgcgatgccttaagtgatgccatatcaccaagaattccacaacccacaactacagatgaaactgctttgacc

SEQ ID NO: 34516 - DNA, 414 bp, Glycine max
agcttgacatcttttgatatatcatacaatcagtttgagggtccacttccaaacattctagccctccaaaatacttcaattgaagcattgagaaataataaaggcttgtgtggcaatgacactggcttggagccttgcacaacatcaactgcgaagaaatctcatagtcatatgacaaagaaagtcttaatatcagttttaccccttagtttggtcattctaatgcttgcattatctgttttcggagtctggtatcatttacgccaaaattcaaagaaaaaacaagaccacgctacagatttactatctccaaggagtccaaacttattattaccaacgtggagtttgagtggcaaaatgatgttcgagaatattatcgaagccacacaatatgttgacgacaaatatcttatt

SEQ ID NO: 34517 - DNA, 423 bp, Glycine max
tatcataatcgattacatagttgtttttgtgacaattattgatttatttaggagtctctgttttaattgattaccatgtcatataatcgattacttttctttttataagtgtttcagaagtaaacaagaacactttaatcgatttctttgagtatctaatcgattacattgttcttgagttgtttctagttttttggaagaacactacaattgattgaaagataatataatcaattacttcattgaattaattaattaccttgtagatttaattgattacaggcggttataactgttttctctataaataaccacattgtgttctctctaataacataacattttgagcttctgaaagagctatgatcacgtgttgttattagttaaagaaagaagagaagaaaagtgcttagtcataacttc

SEQ ID NO: 34518 - DNA, 433 bp, Glycine max
  unsure at all n locations
agtttgtataaaattgaaacgacaaaaatttttatctaagatttccgaataaattccgtagtatatcgagacgctcgaaattcaaaataaacctctcagcaaaatgaaacgacaataactttttactcgaatgtccgaatgaatcccgtaatatatcgagacgctcgtaactgaaaacagaagctctgagcaaattcaaaagataataactttttactcgtacgtccgattgtttcctgtagtatatcgagaccctcgtaattgaaaccagaagcccgtagcaaactcaaacggcaataaatttttactcggatgcccgaatgaatcccataatatatcgaggcgatcgtaattganaacagaagctatgagcaaattcaaacgacaataactntntactcggatgtccgaatgaataccatntaaatcggat

SEQ ID NO: 34519 - DNA, 429 bp, Glycine max
tctggtatcaattacgagcgtctcgatatactactgttacataatcggacatccgagtaaaaagttattatcgtttgattaggctaagagcttgtgttttgaatttcgagcgtcttgatatattacaggactcaatcagaaatccgatttaaatggtattcattcggacatccgagtaaaaagttattgtcgtttgaatttgctcatagcttctgttttcaattacgatcgcctcgatatattatgggattcattcgggcatccgagtaaaaatttattgccgtttgagtttgctacgggcttctggtttcaattacgagggtctcgatatactacaggaaacaatcggacgtacgagtaacaagttattatcttttgaagttgctcagagcttctgttctcagttacgagcgtctcgatatattacgg

SEQ ID NO: 34520 - DNA, 379 bp, Glycine max
agcttattattttgtcggctgctgatctgcatattagctacccagtaacaccctattttttgtaaaataaataaggatgcatagttctattaattaaaataatggtcttaatgtaaataaaataaatatgtttttacaaaataaaaaagatgtcttgtttatttatttcaatacggagtaaaataaagctctctttcaaaattgctctcccttcttcatctccaaaaactctctctttctaccgcatacacgcaaatctatcgcaataaaactatgatcctagacttgccaaccattgaatcatcctgaaatatggacaccaccttcataactcattattgcacattcctattgttgcgatttgccaaataatgtctgt

SEQ ID NO: 34521 - DNA, 430 bp, Glycine max
  unsure at all n locations
tgtaattngtactagatgagaaattgtgttttccttcttaaagatgatgaaactcacaaaccaagaggggggtgggggtgaattggtttctaaatcataatagacttttaaaaaccagaggaaacaaaacttcttttccaaggatcgtatcacaaaattttgataaaccaatatttaatcaatcaccctttacacaaaatcctttgttaaagtttgtcataccctaatttcgtccggggacctttgcttgatgacatgcgacctttctttggtccttgtgaggtgcttggtacccatcattacgcaatttgtgaaattccaggacatgccgaaaaacacaaataaatattgatgcacaatccgtatgtatccgtgacacaccggaaatcaaatggaagcatcgttgcatcattaagtgagggttcataac

SEQ ID NO: 34522 - DNA, 430 bp, Glycine max
tcaagtttggagaggatgcttcaatggaggcaaaaaaagagggagagaaagaaagaggggggagcatgaaattgaaggaagaaaaagggagagaagttgaactttgagttgtgtctcacaagactctcattcatcaaagttacaacaagtgttacacatgtttctatttatagactaggtagcttccttgagaagatttcttgagaaaacttccttgagaagcttctttgagaaaacttacttgagaagctagagcttagctacacacacccctctaataactaagttcacctccttgagaagcttccttgaaaagattcctaaataagctagagcttagctacacacacctctctaatagctaagctcacctccttgagatgagaagctagaacttagttgcacaccccctataatagctaagctcacc

SEQ ID NO: 34523 - DNA, 418 bp, Glycine max
  unsure at all n locations
tctnccctattctgctataaatatgggaatatgtgattaagaaaagggttcagccccttaggcacttctttctctttcgaatttgctaaggaaaattatttccgtgaagataatccaagccgaggcgcttccgtaacgtttccgtgagtaactacgcgaagattctcgaccgttcttcaaagattcatcgttcgttcttcgttttcttcagtcttcaacgggtaagtacctcaaaccaagcttttcaattcactctatgtacccgtggtggtccacattttgtttcatgtatttttattctcgttttcatttactttttatacccccttttgacgtgcttaagccatttacttaagtcatttctcgcttaatctaaaaataacataaatttccaccgatcgtttgaattgtatcatcc

SEQ ID NO: 34524 - DNA, 454 bp, Glycine max
  unsure at all n locations
ggcgaaancagctcggacccgggatactctgagncaccttttgcattttgctagtgcagcgcgagggcccaacagcgtcaacaaggtgttccccaccacgcttcttagcaactccaaacaagagtccaaaaagatgaggaagttgctccctcagttccttaagcccgacgctctccaacgctacgttggaatcatggacaccattgctcgaaaccacttcgcttacctttgggacaacaagacggaactcaccgtctatcccttggccaagaggtcctaaatacattcaccatcttcttctttaaatgattcccatgctactctctataatcaaaatattttccttttcttcatgttaatcaccatggttctcactttcagtagcatcgtgcaacccataaatgaatattactaaatttccttttcacacattaatcccactatgcatcggcat

SEQ ID NO: 34525 - DNA, 416 bp, Glycine max
  unsure at all n locations
taatcataggaaacaaaatcaatccattgtgtaagttacgtgtagaggcttgctttttatgcttctctgttgtttgtttgcgaatttttataaatnttctaaacatctaatattttgttaattcaattcaagtagatattaaagtaactatcattccaaacaacaaagttttggctaaaggataatgtacccttggcgcacgcagttcaattaaatcctattaaaatatctttatggaaatttaattgttgaatagacatttttgtaaattcattacagcaaatatttttattttttaataaaggttggtgcaatgtcaagattggagtacacgcaaaattacttgtgagaaaagataatcggaaaaatcatagcaatagccaataagaagataagcaacgtcagtacatcagctc

SEQ ID NO: 34526 - DNA, 438 bp, Glycine max
  unsure at all n locations
agtttgtcattgaattattngattncaggccagggataatttccattaacttggaccttaagaggggtgcaagtggcaggttcttgaagactgctgcttatggccactttggaagagatgacccagacttcacatgggaggtggtcaagcctctaaagtgggaataatgccatgaataaagctgattgccaagaaactatgtttgatcttatatgctttcatacctaagatccgtgatatgattttgccttagcttttgtatctttataaataaataaaacatatatatgtcgagttgagtatatgaacatacaaaggaagctgcatagcagcatcaatgtactattggaagttaatgtttgagatatatccgttacgatcgctatccattatccattatgtttcctctcaattgctgagagtcttagagaatcttga

SEQ ID NO: 34527 - DNA, 432 bp, Glycine max
tgtagtttaaatttgttttgagttacatatatggtttttgtgatttgttgtcaactcttatttctctttatggtttccatttcactttgaattttattattcattcctcatgtaatttattaggtacactaataataaatggacttgcatagggaaggtgattttccaacttagattctacagttgcattctttatcttcacttcatcaccaattacaagcaaacataattataacttgtatgtatatcatcagttcatcaccaatttgtatctatatccttacgcaagtttctgttttcttttgataagttcaagtcactatcatcaaatcagttaaatggaagcattccagatgccttatcattgttaactcaattgtcagacttgtgagtttatagcattgcctcatctcaatactaagttgttatatt

SEQ ID NO: 34528 - DNA, 438 bp, Glycine max
  unsure at all n locations
agtcttcttttgccattcctgcgaaggcaaacatttggaaagttagttttaccagtgggacgttactctttaaagcaaaaatggcatataacctcctcccataaattcaaacatcaatgtaaatttagagtaagcttatgcgcatacttccttacaaatgttctcttgcacacgacattctattaaccgaaaaatgcacccatatacaatcaaggcagcttcgttacctagattatttatacgtacctccaaggtgtatttgttacttacatcacacacatctccttggctaaactcacatacatgcatactcaagcattttggggcaccaaaaattgcacatgtgcacatcttggcatttctaatacctacatacgcaaacttcatgatgaatctngactatctacacaataaggtgctacatttcatgctcttttc

SEQ ID NO: 34529 - DNA, 433 bp, Glycine max
  unsure at all n locations
ntgaggatttggtctttgccagtgaaaggatcgatgtgggtcttttaaaaggaaaatttagtcatcctgcttggacgaatgagaaaactggggcaaatgaagagggtgagaaagagggagaaacccatgctgtgactgccattcctatacggccaagtttcccaccaacccaacaatgtcattactcagccaataacaaacctcctccttacccaccgcccagttatccacaaaggccatccctaaatcaaccacaaagcctgtctaccgcacttccaatgacgaagaccacctttagcacaaaccaaaaaacaccaacaaaaaggaattttgcagcaaaaagcctgtagggttcaccccaaattccgttgtcatatgctcgaacgcaacgtgtgcttataatggaggagccccggtgcattccattgagcat

SEQ ID NO: 34530 - DNA, 439 bp, Glycine max
  unsure at all n locations
gttatcattctntctacaaannccttcacagataactaccataaggcataaacctagtagaactacccatcatatctcccaaagacccaatacccacgaatttcatgtgagaagaagtccacccatacctgaaattcgaagtcccacaacgtagaggtgcgcttcacgacttcgaaaatggcttccttttgcaatttggagtagaagtgatgagcaaagtttggagctttaatgggcaacaatggtggaggagaaagggagaagaaaagcaacgtgggagatgaggaaaaagcttctgaaaatctgctgagcgaagtgagagagtgtggctntttaaaaaaaaaactttctttttcctattgttttatttcttaacagcacttgccacttgtcccattgtgagtggaacaaanaggggcccacttttctctcgatgtga

SEQ ID NO: 34531 - DNA, 363 bp, Glycine max
gggagggcgacgcgagactcacgggtgcgtcttccaagaaaggaaaatgcatggagtcgccaccaacgtttatttggggaaaacatccgaaaaaccgaaaaagacgtggtctacaaactttaagtgtgaggctcgagagttgtatttacgcacggggaaggtattatcacctgttagacaagtggcctcagatatcttaagaagggggggttgaattaagatattccaaactgtttcccctaattaaaaatctattttattttttactcaagttataaattcccttaatgacaatcttcttaaatattaattcaaatgaagcaacttgaatatgattatatagcaataatatatataggagat

SEQ ID NO: 34532 - DNA, 335 bp, Glycine max
  unsure at all n locations
agtttctgnttttgatttatanngggcnaaagaagctattgaattttgttcccagcacatcgaaacagctcaagttgttgggcttcctgaaactcgtgatgaccggacatggggaggtaagggtacacgaagatacaatgttgtaacaatgattcgacaaaatgtcttacaagtgcattggtatatctcgaataacacataagaggttcttccttacatacacactcacaaaaagtatctgacagctattcacccacaaatgaacatgatgaaagtgttgcacgagcataatagaactttcatacatcggttaaagacataatcttctctgatga

SEQ ID NO: 34533 - DNA, 434 bp, Glycine max
tgttgataaattccaacctatcgtaatcttggggttttcaatttttcatatttgaagctacatatacactactatatcgatcagaaagtatgagcatatatgtatgcgtattcaacccagataatatttaaaaaggaaatcaaaatacagaacaaggaaacgaatggatagagtataatcatggtgagactttgacgtggtgtgattttaaggagtctagattatggaattattaacacaagattcttagcatgcagttatatttgaggattacttgtcatcatggatagaatgtgattggataatcatagaagacttatattttttatccatttaataccgatagctgacgctgtctatcttaaactcttaatacaatcacggatatataaataaacaaatacgtacacttatagtatatattggccaacaca

SEQ ID NO: 34534 - DNA, 419 bp, Glycine max
  unsure at all n locations
agttttgcagattnggncttcgccagtgaaaggatcgatgtgggtctgaaaaaaaagcaaatttgatcatcctactaggacgactgagaaaactggggcaaatgaagagggtgagaaagagggagaaacccatgctgtgactgccattcctatacggccaagtttcccaccaacccaacaatgtcattactcagccaataacaaacctcctccttacccaccacccagttatccacaaaggccatccctaaatctaccacaaagtctgtctaccgcacttcccatgacgaacaccacctttagcacaaaccanaaacatcaaccaagaagtgaatcttgcagcgagaaagcctgtataattcaccccaattccagtgtcctatgccaaacttgatcccatatctacatgataattcaat

SEQ ID NO: 34535 - DNA, 430 bp, Glycine max
tgacactatgaaactcagctagcatacaaattatcccttaactgggcttaggtacttgattgagacttgggttcctaggaaaaaaagctataatatttcaacttggtcttagcctttatgcaatgggaataggttgaagttctaggcataaacaaattcagtttgatcaccatggacttgtttagtctagacaataagaacttcttcaaatagtggaggttgagttgcttaattttgttttataggtagcactcattttgttagtttagatatgacatgtttagtcttaaaggttgtagaacttcttctcctattaaaggaaagaatggtctgatcatcatttttttctagtggaccaacattagtttgtgtaaccacttgatcttccttcataataatttatttaaacttaatctttaatgatctcttt

SEQ ID NO: 34536 - DNA, 436 bp, Glycine max
agtttgcttttgatcatgggtcagacgaataaggggctgaagatcaactcgtagtggctcacgacctaactcctatagtggtgaaagaaacctctgtctcacactatcacaggaaaacggttgacatttcaccacaagacgagaatttggaattgcacatagtatctttgcccagacctgcagtaccttgggtcgtaatctgaataaataaaacaacatgaatcacgggatacacgacttacctcttacaattaggtattcataatctaaaatacaagtacgtgatatatttaacaatattactacccttggcaagattgttggaactaccaattgcaacgaagccattggtaagagcatgagctggacaaactcgaccagcctcacgggattgagtgtaaccaaggaagcattccggttatcgaactatctcttc

SEQ ID NO: 34537 - DNA, 427 bp, Glycine max
tcaggcaattatctaattcgtcatgaataatactatctcataagcttacactttctatgtagagacatgtgaatggttttctattatatccctaacataactaacaaattaactaaaggctgtagcaaatgatttcattaatataagagacagcctcccttacctaccaacccaataattgcttttaccactttccaaaagattaaataaaaatgaaagcattaccaagatacagggaacattgacatggtttaatactgtttatgttgcaagtgttagacagcttatggttccatatttgtaggggcagatgtgtctttgaataagtctatcacattattaggaaatagtgggtcatatatgcgtaatatacgtgagcagttctcttttgttttcaagtccacaactctgatgtaacgctatatat

SEQ ID NO: 34538 - DNA, 406 bp, Glycine max
  unsure at all n locations
ctttcaagttgctctacannacancgatgcncatattcatgggaggagggcgcatgccattcttgttttaagagtagtgtcccactggtaaaactaactttccaaatgtctgccttcgcaggaaatggccccgaggaagcttgcctcacagaggtccaggagggacaaggcagccgaaggaactagttccgctccggagtatgacagtcaccgctctatgagcgctgtacaccagcagcgcttctaggccatcaagggatggtcgtttctccgggagcgacgcgtccagctcacggacgacgagtatactgatttccaggaggaaatatggcgccagcagtgggcatcactggttactcccatggccaagcttgatccagaaatacgtcttgagtcttatgccaat

SEQ ID NO: 34539 - DNA, 276 bp, Glycine max
gacataagaaactcacgctgagagagaagagacaagcggaactttctgcttttattcgttgaccacagagtggtacctggagatatgtcgcgggggtcaggagaccttggggacgacaggcggggtgctactgcccaaaaccaagcttgaccaatcccgacccaacccgggcatagccggtcagtgagaacctgtgatgtacctaaacaggcgagctcctggcagtcaacagataaaaggaacagagaccacaaagcaaggacgcttgcggaggct

SEQ ID NO: 34540 - DNA, 427 bp, Glycine max
  unsure at all n locations
agcttttggagtagaaacctgcgaccaactgattctatttcagaaaggaagtcatatctagtcaaggtctgagagaccatacaagtttcctaacgatttctaattatgtgggccattaagtctatcatatgctgacaatagccgagaagcccgtgaatctcttcgggggtggagtaggtgtctgccatcgccttggccttggctaacaatcggagaagttcttgactcccgttcaaggtaagagcaaaccgctccatccacatggntgcctcttggtgtaaagagtcgatcacacttcctctagcctctttttccgcatatacttgagcatactcatccgcgattctatgctcgtgggccgtggctagacctaactcttcttcgtacttggcgatgatagctaacatgttggtctctgtctcgcata

SEQ ID NO: 34541 - DNA, 367 bp, Glycine max
ttataaagcttattatatgctcaacgttgtctctagaacatttccactggatttaatgatgaaatctatgcattttcaggtgaaaagaggctaagtcttgaatcgcaaaatgtagcagttgggctaagctcagcatttgggctaagcgcatatccaccgctaagcgcagctgcagcgcgcttagcgcaaaggagaatctggcagagcatcaacatcaaagccacgcgctaagcgcacgatcagtgcgctaagcgcagcatgtgccttcagcaaggctaagctcgagactggcgctgagctcgatatcacttactctcgctaagcgctagggtggcgctaagcacaacatcgcgattgtagagcctat

SEQ ID NO: 34542 - DNA, 411 bp, Glycine max
  unsure at all n locations
tttcaagtttgctaacccatggaagctcctaatatctcccacactttttggggtgggccattcttggatggccttgattttctcaggatccacttggaccccatttctaccaactacaaaacctaagaaaactatattatctacacaaaaggtacacttctctatatttgcatagagggtgtttttcctaaggactgaaagaacttgtctgagatgtcctaagtgatcatctaggctcctactatacactaaaatatcatcaaaataaacaactacaaatctacctatgaaatcccttaagacatgattcataagcctcataaaggtgcttggtgcattagtgagcccannaggcatcactagccattcatacaaaccaaacttggtcttgaaagcagttntccactcatc

SEQ ID NO: 34543 - DNA, 424 bp, Glycine max
tcaagttttagaaggtgtctgccctttgataagcccttcacttggaagaagtttgaaattggtagggggaagactgactctatcttgtttaggtcactagctgacctgatttctaccatcaggtgtttacgtagttcatctgtaccatttccttcaacgtggcaacttataattgtcatttccggctcctcaaaaactataaaatccaatcccttgatatcctcagttccaacctgtgaacatcaacccaagcttacaacagagcagaacattgacagcaaatctaaagcagatagctaccgggaactaaccttgacagcaatagaatctggagatgcacgctctatattagaactgcccacgtcccttttagccactttaacaacatagtcagtatcaggcagtagtcctctcagacgataat

SEQ ID NO: 34544 - DNA, 291 bp, Glycine max
cttgaatgagtttttttgggtatgagccgctatagtttataatctgcattatacgtcgagtaaatacttttcctcttgtctttatatgtgagttttatctttttcactctttacatttgattcatatttttaaattgaatgtcaatttttttcaaaaaatataccaataataaaaaataatcttgtatcaagatataaatgtttatgtaaatctaaaattaaaatatttatttactgtatattaaaattaaaatatatttatttgttgaattctttttatcaacctgtcta

SEQ ID NO: 34545 - DNA, 416 bp, Glycine max
  unsure at all n locations
tcacccctgcccctttntatgttttctggtccaatgttgctcgcctaggctagctaacatgatcatttttttttggcaaaaatttaaatgcccccttgtcatgcttgtgtatttccttaattccaaggattgcaaataaactaggcatattcgaatgtaacttaagaaaatagatgaaaaataagaagcagaaattttaaaggtactaggctgcctcctagtagcgcttctttaacgtcttgagccggacctgngatgatgatctattgatcgcgggcccagcacctactcgtacctgcccctaagcttttgaatacaagaaatgacaacatgcagtanatgcaaaacaacatcacaaaaccgatattacctttcgcttaccttttatctagaatttggtgtggtattgaccatcg

SEQ ID NO: 34546 - DNA, 435 bp, Glycine max
  unsure at all n locations
agcttgaagtgaggttgtgtggaagggtgagacttcctacttttattcgttgaccacagagtggtacctagagatatgtcgcaggggtcatgagaccttggggatgtcgggtggggtgctattgcccaaaaccaagcttgaccaatcccgacccaacccgggcatagtcagtcagtgagaacctgtgatgtacctaaacaggcgagctcctggcagtcaaccgataaaagaacaaagaccacaaagcaaggaggcttgtgtggtggctggccagctatggatcttgagtaatatgtggaatatagcctctggtaatcgattaccaagggtgggtaatcgattacaaggcttanaaatgaagacaggaagttaagatggtctctggtaatcgattaccaagggtgtgtaatcaattactacgcctaaaaatgggat

SEQ ID NO: 34547 - DNA, 432 bp, Glycine max
  unsure at all n locations
tcctattcatcgaagcagcataatcaaacttgcctcttcttatgcctacctcaatcctctcgcctacaaacactaaatctgcaaagcttgatggcatgtaacccaccatcgtctcatagtaaaacactggtaatgtgtccactatcattgttatcatctccttctccattattgggggcactacttgagctaccagatccctccacctttgggtgtattctttgaaagattcatgctccctcttacacatgttttgtagctacattttatccggagccatattagaattgtactgatactgcccattgaaggcaaccattaggtcctttcaggaacggacccggaaaggttccatattagtataccaggtgacagctgtcccagtaagactttcctggaagaatgcataaacaatntttcgtctttcatgta

SEQ ID NO: 34548 - DNA, 403 bp, Glycine max
agcttgaagctccaggaaaagcttgaagaagttttgaagatgttttggcttttacatgcctaactcccttgagtggcatttgtattggttgttatcttggttgtttcatcttagtacattttgatatttgtattgcatcatgcatcatcgtggtttatgtgaagaaaagcttctaagttagaaagtttattcagaggaaataactctctattttaatcggttacatcctcatcgcaatccattacaacaagttgtctaaagcttaaagagttgagtctcatattagtttaatcgattatagtagtcttttaatcgattacactgttgtttgagatagtgactgatttattcaggagtctctgctttaatcgattgccttgagcagagtacttattagacctat

SEQ ID NO: 34549 - DNA, 433 bp, Glycine max
  unsure at all n locations
ntcatatcacttggatgcttcattgcttcaaataagtcgaatgatactttctgatcctccacacccaattctaacttgcctttccccatatctactatatagttggccatgaaatttgtagggtcctcctctatatccataaccacgaaatctgcaggaaatacaagctgcttgacttgaataaacacatcctcaatcactccatacggtctagtaatggagcgatcagccaactggagggttatacatgtgggcattatctctatctctccaagtcgccagcacatggatagaggcattaaattgatactagctcccaagtctatgagagctntacctacaacaacctcaccaatagaacacggtatagtgacacttccgggatcattatgcttcggnggaaggatgcgttgaatgactgtactacagttac

SEQ ID NO: 34550 - DNA, 413 bp, Glycine max
  unsure at all n locations
agctttatccttagatccctcttgttgtactagactcagcttaaatagctttcgaaagtttagactaatttagcctaagctttgtcctcagatccgtcttgttggactagacttagaccaaacagcattattgtaatagcatatttaaaaccaaaacttaatccgcagatccctcatttaagactcagtttcaattctgcttcattcaagttctaaggcaatagtacatttcccaatgctaaagccacctaacagaaggttcaggctaggatataagcctacatatgccaacgtgaggggaagtgcccaagaaaggaggggtagaagcatgggccagccacaaggaccgcaagtgaaggggattcccttatgtcacatcaacanaagctttgtcagcacaagttggatgtgtg

SEQ ID NO: 34551 - DNA, 429 bp, Glycine max
  unsure at all n locations
tgacgtaacactntgagcatgaaagtatgtnnncttttttnattatgcatataggngnatggcaattagaatatattagatgttcttgtatgttaacatgggtaataggatactttctacacattcgcgttaatataagcattatcttgtaaactaacttctaaatgtttgttctcgcaggaaatggccccgaggaaacttgcctcaaagagatccaggaaggataaagcggccgaaggaaccagttccgctcccgagtatgacagtcaccgctttaggagcgctgaacaccagcagcgcttcgaggccatcaagggatggtcatttctccgggagtgacgcgtccagctcagggacgacgagtataccgatttccaggaggagatagttcgtcggcggtgggcatcactggtcacccccatggccatg

SEQ ID NO: 34552 - DNA, 438 bp, Glycine max
  unsure at all n locations
agcttgaatttggtttagacatgattgatacatgatttgggacttgtaggatttgatttgggcaagattggatgagggaaagtgtgattttcgaaatctgcacttatgcagaattttgctgtcaaataggtacagcagaattttggctttgtgcaaaaaaatgctatgcatttgctggttgtggaaagagtagtgtagaatgagttctggatgtttgctagtagatcccaacggtcaaaatgtaggcttatgtactagagacttccagtaaaattttcgagtcgatccaacggttaacgaactggaatgaaggaattgttactggggtctttaagtgagaaaagctgtgattctggttggtgttntgggcagagttttctgcctttgccctatnttcttggctgtgatagttagtgctggttgaatattgtcttacct

SEQ ID NO: 34553 - DNA, 438 bp, Glycine max
  unsure at all n locations
tagaaactcaagcttcattctacaccttataaagaggatgagatagctgctcaatagatataagcttcgngatcatgagggagctaacaaaaattttcatccaggtggaccttcttctagtaattctgacttgcagcagcctcctatccatcttctatttccacctagagcaattccaaacaaaaaagatggaagaagtggataaggagatcttggagaccttcaggaaagtagaggtgaacatacctctgctagatgacatcaagcaaattccaagatatgccaagtttctaaaggagctgtgcacccacaaaaggaagctcataggcaatggaaggattagcatgggcagaaatgtgtcaacatggataggtaaatctgttcctcacattcctgagaaatgtaaggacccaggtactttctgtataccttgcatta

SEQ ID NO: 34554 - DNA, 434 bp, Glycine max
  unsure at all n locations
agcttatgtgaattcgtagttttataagcaaagagtaaaaatttatcataataaaaagctttcaaaaagaattttcagcctagccaacaggtattgttatttaattccaaattaagattgttttcaggtaagctaaaatccaagtggtctggaacattcagcatcaaagaagttatgctacatggagcaatgataattggaggatccagccaccaaaagaacatgcatcgtgaatggcagtagaatcaaaccctacttangtcgtgatttcaagaggttgaccactgttgtccaactacaagaggctngaaccacaacaaggatgtccagcttanacgatgttaaataagcgctcttgggaggcaatctagtatttttcaactcttcttttaatattnnntttctgattacgtaattgtgttgtgtaatatcta

SEQ ID NO: 34555 - DNA, 399 bp, Glycine max
  unsure at all n locations
tgactaggcgagttgattntagcctcagtttcaccttatttattagtcatttctgttaagaatgagaaatcccatagagaaaatgtccggttgattttccgctctattttactaaaaggtatatttttgttattatattattctttacctctctcttagagatgcaaaattgtgtaacaaattacttctttcaatttgatatgacaatttagttcatctaagttacgagagcatgcataacaaaatttttactgtcaaatacatccaacaatgtcatgcaattttggtcattntttacaaattgaaaaaatagatgttgggataaatttatctcactttttacaaagagataaaattttatttttttctaatttaggaactcaaatggcagcgcattac

SEQ ID NO: 34556 - DNA, 412 bp, Glycine max
agttttatgaaaatcatgtcttttccccaatttatggttctttttttaaatttgtacatatttttaggtttagtttaattttgcttagtagaattacccattattgtgaattaatgtgttttcgacttcagtttcaggtaaaaggatgaagaagataaaggtcagtagctggtgtctcgctaagtgaggcttatgcacttagcgagaatcatccgctaagcgagacactcagcctgcttagcgagttgggaaaaacttctatggattttctaatttttgaattgggctgagcaagtcttcccgctaagcgcgtggatttgaattctaaaaactcaaaagtcattgagtgctcgcttagcaagtgaccggcgcttagcgaggcagtcgaaactgccaaaaataaagcttaact

SEQ ID NO: 34557 - DNA, 422 bp, Glycine max
ttaggaggaagcaggacatggacgtcagtttaccgtttagcttctgcacttcctaaacattggtaggattgtgaatcactagtatgtttgtgcatttgtcggggttggcttctattccctgatgtctaatcatgaaccccaagaactttccaccgcctaccccaaaagtgcatttttccaggttgaggcgcatgacgtacttatggatttctctgaacacctcttctaagtatgccacgtgttaggctatgctttgagacttgacaatcatgtcctcaacctagaccttgagattttttctgatatgttgtttgaagatccggtctatcagtctttagtatggggtgcctacatttttcaggccaaagggcatgaccctatagcagaagttagcatccacaggtatgaatgtcattttctct

SEQ ID NO: 34558 - DNA, 363 bp, Glycine max
  unsure at all n locations
gctcgggacccgtggaagctctccagtcggcctgcaagcttgcaagtttcttgagaagcctgccgtgagaagctagagcttaggtacacaccctgccctcctacctaggctgagcttcgtgagaggctgccttaatgaggagtcctatagaagctcgagctgatctacgcacacctctatgcttgctaagcgcacctgcgtgagatgacaagctagagcttagcgtcacacccactataatagctaagctcacccccatgacacattgcatgagaatacaattaattccctactactaagactactcgagatgcctctcattacagggcatacaccctatactactagantggccaatacact

SEQ ID NO: 34559 - DNA, 359 bp, Glycine max
tctccttcttttccctataaataggggattgagggattaacatttatgcccaaccctcctggtatttgagaatcactaaaaattagtgagaaaaattgttttcgtgaagaaaacccaagcctaggcgctttcgtaacgctttcgtgacgtttacgtgggtgatttcgcgatgatattcaaccgttcttcgtcattctttattcgttcttcgtcgttcttcggtcttcaatcggaagagttccgaaatcgaacttttcaattcattctatgtacccttagtgtgccccacttgttacgcgtgcttttattttcatttcattgacttttcgtacccgcttttgatgtgctctagtcattta

SEQ ID NO: 34560 - DNA, 416 bp, Glycine max
agcttggaacacgcgccgagggcgcaaattaaggccaccccatcgagggggagggcgcgctggcgcatttggaggtagaaacggagggcatcaagggggtgggagcagcggatgagggcggtgtagtcgacggagtccttgtgcgagtgggggattcggtcaaacagtttgcgggcgtgggaagggagggggcaggaggcgtagaggtggaggagggcgttaaggaggaagctggagggggagaagaggaggccggagacggtggccgcggcgtggagttgctcgccggggcggacggcggaggcgcgggcgcattgtcggagaagagaacggaatatgagagcacactgctgttgtgtggtgtgtgaccatctcataccataatatgatatgattatttgagttacgataaatag

SEQ ID NO: 34561 - DNA, 427 bp, Glycine max
  unsure at all n locations
ntaacataaagaacaaaagactggcctctgcacgaatattatacattgagcaaacaacactgatctcaaatcggtgataaaattctaattaatcgcaattggaagcttcataacatttaatttggataagattttatatgtaattattatttactttgtcaaataacaaacttaatgtaacaatcttatcattagatagtcattgagaagtgaatagaatgaaatgcatcttatttggttatttaatttcacctttttcaataactaaaatatgtataatgttttctaactcccgttctatctttaaaatgtatcctactcgaactagttccctgggcatttattatatgggtatttacaagtttaaataaattttaaaaataagaattatatgaaaatatcattattgttcaataataaatatcat

SEQ ID NO: 34562 - DNA, 434 bp, Glycine max
  unsure at all n locations
agttttggtctctttctttntgtcatgcacatagagagagtagcaatgcaaaacaaggttctatgttagggttagtttgagaatttaggatgtttgtccttaaatgctttttccttttggtgacagatgtagtaggagcttccattgttagagtgtagttgttgaagaaagataacagcctgtgagaatcaatctgtgcgttattttaggagtgcatgtttgatcaatattattttaggatcatatatatttcatgttttctagtataaatatctacaattattcttgtactaagggagacatcttttgtttcctaaaacatgtgctangaactttgtatatatttcccgttgatctgatcaatgaattatccattcaaaccataatagttattgctcttatttttntgagtgataaaaaatacacagagaatg

SEQ ID NO: 34563 - DNA, 429 bp, Glycine max
ataggtaccaataccatatactattttgtgacaaaattaaagatattaaaccatgtccttcaaaatcagccatctgggtacttcacccaccaagtaatgtggcactttatctagctagtctcggttctcgatgcttccaagagcccttttgagttttccctaccaaatttctctcaccagtcactaacataacacaaaatttctgattcaggtctcttccgcgtatgcgccaccacatcatcacaatgtcccacttacatattcgcacatttatattattctacccgtactttagtacttaccatcttcatttcataccttatatatatatatatacaactctcatcacacactataaataccctctcattcttcttatcattccacgcacttagcaatcaatcaacacttccaattacaatatacaca

SEQ ID NO: 34564 - DNA, 375 bp, Glycine max
  unsure at all n locations
agcttgaatgtgtgtaccccaccatttttcatagnaaaacactggtattgtgtctactattattgcgatcatctctttctccgtcaatgtaggtgccacttgagttgccaagtctatccatctttgggcatattctatgaaagatccgtgccccctttttgcacatgttctgtagttgcatcctatccggagccatatcanaattgtactgacactgcctaatgacggcgaccattatgtccttccaagaatggaatcacgaacgttcctaagttactataccaggtgacagttgtcccaataagactttcttggatgacatgtatcactagtctctcatcttttgcgattgcacacatcttttgacaacacatc

SEQ ID NO: 34565 - DNA, 394 bp, Glycine max
tggcgtcataccctaatttcgacagggtcttttgtttgtgacatgcgacctttctttggtccttgtgaggtgcttggcatccatcattagccaatttgtgaaattccaggacatgccgaataaccaataaaatattgatgcacaatccgtaagtttccgtgactcaccggaaataaaatggaagcatcggagcataattaaatgaggttccgtaacattccgtaagtcaaaagggggatgattatgtaatccgcaaggtttcgtaacattacggaaagaaaacaagtatcgtcacgaaattctaagtttccgtaactttacgagaacagaatcacctcataacagcagagggggtgcacttattaaaaatgggggtgcaaatagcacccaggcc

SEQ ID NO: 34566 - DNA, 390 bp, Glycine max
agtctttggaaaatattctttggccagagcatcatcaattcacaaattctttctaagattgtaggaactaagttcattaattatattgaatttctggattgacttggatcaaacgtgagaagcgcttagaagctcagccaaagcctcagccaaaaacactgtcgcttggaagctcggatatgacgctgacaccaaaacaactcaatcaagggatcaccaagagaacacaggcagtgcaaaaccatcaacaatctcttcagcaacctctgcaatagctgataaagccatataagccaaaaacacagtctcttccaagctcggatacgctgacaacaacactgaaactactcaagcaagccatcaagagaacacacaaccatcaacaatctc

SEQ ID NO: 34567 - DNA, 396 bp, Glycine max
tcgaagtgacagtgctttcggctgaggtttctgatgtgattgttaacggttttcattgcttgagttctcttcttgatgctttgttcgagttgattcggtggtgtcatcactgtatccgagctttgaagctacaacatttttggcagtgatggctttgtcagctattgctgtggttgctgaggagattttatctgtgtaactgctctcgtttgatggttcttagtgtggctcctcaacttgtgtggtggtgtaggtttgcggggtattggttcgagttggatattctggtacaaattgatcatgacttccagctgaagcacaaagagtatgtgttgaatctgttctaaattgttgcggcaagtgtcggtcatggatccttgatgaagtgtgctgaat

SEQ ID NO: 34568 - DNA, 433 bp, Glycine max
tctgcttatgctgcaaatatttacaatagacctactcaacctcagcagcacaatgaaccacagtagagcaattatgacctttccagcaacagagacaaccctggatggaggaatcaccctaacctcagatggtctagccctcatgaacaacaacaacagcctgctccttacttccaaaatgctgctggcccaagcagaccatacattcctccaccaatccaacaacagcaacaaccccagaaacagccaatagttgaggcccttccacaaccttccctcgaagaacttgtgaggcgaatgactatgcagaacatgcagcttcagcaagagaccatagcctccattcacagcttaaccaatcagatgggacaattggctacccaattgaatcaacgacagtcccagaattctgactagctgccttctcaagctg

SEQ ID NO: 34569 - DNA, 419 bp, Glycine max
tgtcttcaacaaacaaatcaaaatcaattttctgattttcaaaacctagctccagcttccttttccccatatcaactatgcagcttgcggtcaacatgaatttccttcccaatattatagggatgtcaatatcttcagagacatccattaccataaagtctaccgggaagataaaatattttactctgaccaaaacatcttcaattactccatatgacctggtaatggagcggtcaactaattgtaaagtcattcaagtggggcatttccaactctcccaatcttctgcacatggagagtggcatcaaattgatactggctcccaggtcaataagagcttttcctacattgacttctccaattgaacaaggaatcgttacactcccaggatctttatgcttgggtggaaggatcttcta

SEQ ID NO: 34570 - DNA, 440 bp, Glycine max
  unsure at all n locations
agtctttgtttcctgcgataagtttgcaaagctatgaagattcaaccatgcttaattatgatggttatttttgttacatctgtactttaggaatagtaaaaacacatggtgatttgtgattgaaatttatcaactaaaatatgctagtaaataatacattcttgctttgatttttagcagagatccacatatgatgaatctttgaatatttgcagtgaactaaatgatactgttattgaggcacaactaaggacaagacaagttccacctcggcttccaaccaagactgcaattgaaagttatcagcagtcaactaatcgactgctcattntggtatgctgtctcacaatgaagctcgagacttctctgaatacatctttctgtttccttgtcttttactccttatctgagttctttctacaggatactgcttcatttct

SEQ ID NO: 34571 - DNA, 430 bp, Glycine max
tatcgtaatttattacacaattatttttgaggcaatgattgattctttcatgagtctctactattatcaattacgaggtgatatgatcgattacttctcttttaaaagtgtttcagaagtgattaagaacactttaattgattacatcaagaatctaatcgatttcattgttcttgatagctttgcagtttttgggaagaatactttattcaattgaaatgataatataattgatcacattgtatatttaattgattaaagatggttataactgttttctctataaatagccaccttgtgttctcacttctaataagttctaacaacttttgaatgagctagaattacgagctgataataatgatacaaaaaaaaagaagaaaaagtgcttagaaatattgtgaatcataacttctaatatttgattatg

SEQ ID NO: 34572 - DNA, 419 bp, Glycine max
  unsure at all n locations
agcttgtagatttgctatacatgatacatgtcagggtttggtttggttcaaggataaaagggatgccccacattatttccatgacacaaatgcaaaaatgatgatttggaaactttacgcaaaactggtcatgcatgcacctatgcggacactcaagtgtcaaatttttatggtcatgtgatgctagggctcaggattcgtttcctctattttaatcaacccaatgtttccaaaatatgttcttttatcaatttgtgcattcatccgagtccatttcgggcgtccggngaaatttcacagcattcacccttcaagtgtagacacattttccaaaaattgcgtatgatcaatgaatgttttcaaagaaaagttggaagagatctctcttaagagcatgatggtatttcagctagacaact

SEQ ID NO: 34573 - DNA, 402 bp, Glycine max
  unsure at all n locations
tgtgaaatctcaggatggaccattgggtcaagcccatctcatcaaagggttatatttatttgatagtatgatgaaaaattgcaagaatctattattccgaaaattaaaaatataaattgttacttgtcccttttttcttggctaggtttgaatctgttctcagcactttggaagatgcggttaatgatgcccccaaagcaccagagtttcttggccgcatttttgccaaagctataacagagcatgtagtctctttgaaagagattgggcggttaatacatgagggtggagaggaaccggngagcctcttagaagctggacttgcagctgatgttcttggaagcaccttggaggtaataaaaatggagaacggtgatngctgtttgagtgagatctgcacga

SEQ ID NO: 34574 - DNA, 404 bp, Glycine max
  unsure at all n locations
tcacagctganagtatagaatggtcagtaacaatatctctgaaatttatcatactaaaaccaaactgcacaccctactcacacgcctaagatcactggcgactagaccagttggggtagagagacccctggtccatgtggatcctgctaccgggaaagcagatggtccctacaaaaagaagttaagaacctatttggggatcgtcgctcgtgataaggtgaatgtcacatacgagaattggaagcaagtccctgctgcttagaaggatttgatatgggaggatattcacgtattttagttntcatgttgcatattgtttattaaccaaaaattcaaatttagtaacaataaaacgtaattcttcgtttgtcaggctgaatgtgatatccctgaagcatctgatg

SEQ ID NO: 34575 - DNA, 422 bp, Glycine max
gtactatcacaagcacataaacacattatcttcattattgcatcacacgatactctatttgaaaatggatcttttactctgtacctgcaaggactgctgacccttccacctgatagttcattgaatcaattgacaaaatatatcataagatataagtctcaaagttcataaatagagagagccacacggtcaaaataagcaaactaaccatgactgcagaaacaaatattgaaataaataatataccactattatgtgtagtggatctttccaatttttgtacctaaaactcgattttcttgttaaccaaggccaaaaagaccaccaaaacgagacttgtcaaccacttgagagcctaactgaacttgcttagattataattttgctcttacgaacttacaatgttataacctcggtgaaat

SEQ ID NO: 34576 - DNA, 311 bp, Glycine max
gtgcattcttagatggctctattcaacacgaactatatgatggtcaaccccctacatcctataactcagacatgtcctatcacgttttaaattgagaaacgctttatgtggcttataacaagcccctacggcttggtgggagatactgactaaatcccttctacaaatggacttcactacatgaaagggtcatactactcgtcttctatcagacaaccacatcagatcatattcgggcatactgatgtggacgacataatgctcggaccgactgcacatatatagtgcaccgaagtctctcatctacgtgc

SEQ ID NO: 34577 - DNA, 429 bp, Glycine max
  unsure at all n locations
agcttgtaatgatcttagatagaagtgtgagattaagttcttgagtgaaatccctcttatgaggtgaaaatctatattttgtgcagtccaacacaaatctatttctctataaaattccagcattggctggcaaaggtgaaacccaatggtgtagctagtctagttagggctagaattaaagtctagtggggaactgacaggttgttcaaacttagtggtttgttgtttcaattgtgaattggttgtgttagtggaatatcatatttaagggtgaggactagacatagcccaaggttagggtgaaccagtataaaaaccttcgtgcattnttctatattcttactcttgactntgttttgcatagatctgacaaaatacttttgatcaaaacattannattgttaacctttcatcttaacaactaaactg

SEQ ID NO: 34578 - DNA, 402 bp, Glycine max
tctcagccttgcaatggcaccacccacattgtgaagtgcaaaatttttaattggctcctccttctcctcctttgggctcacggttaaagcaagaaaaaggagaggaaattggttgttttgtgtctttgggtggctaatgtaaggtgagagcagagagcttttacttgtgcactaagtagaaatgaacaaataaagagagaggtgggtgagggagtcagggtcaagtgttgaattggataaccaagttgttggggagagattttgccttgcatggtcagtcccctttccctttggtgggtgcggttttggcatgatggccctttggggtttatactgtgtaattatcttacacagtgtaatcttgtattgtgaaatctttgcaatagaatttaattttctact

SEQ ID NO: 34579 - DNA, 406 bp, Glycine max
  unsure at all n locations
agctttaaaagttttctggtttccaaaccttgttctttcacagaaaacaaaagtgtgttattcatctttttttattctcctctccctttgccaaaaagaattcgccaaggactaaccgcctgaattctttttgtgtctctcttctcccttttccaaaagaacgaaggactaacctcctgaattcttttgtgtctcccttctcccttttcaaagaattcaaaatgacacagtctgagaattcttttgattcttccctttcccttaaacaaaagatttcaaaggactaaccgcctgagatatcttttgtttcctcttcacanaagttcaaaggactaaccgcctaagaactntgtcttaacacattagaaggtacatactttgtggtacaagtagagggtacatctac

SEQ ID NO: 34580 - DNA, 428 bp, Glycine max
  unsure at all n locations
tagagccatagtctccactccccatctgacaatgattttccctacactgataagggagattataaccatcaagtctaaccaaaagcaagcatgctagtgctatgcatagagcctgaagatagcatcatatcctcccatccgggagccgaccatgcctcatcccatagtggttggaagcacttaagtcatgacagtggatgaagggtctctaatccgagctctaaccgtctaccaagccagcctggatggtgaatttgacatagatccgcaagacgacacctctgacagaggcctaaaacccatcaaagagcttgtacagctgtaactcagacctagaccggngtagtgcactcggcttagtagggacctcactagttatgagcaccagcgcatcgccgacatggctatgcaaaatgcatatttatttt

SEQ ID NO: 34581 - DNA, 305 bp, Glycine max
agctttggttaatgatttctatacaaaagttagtcatataaagcgactaacacacattatcatcaataacaacatcattctcattgatcgaggccgtacccgaatcaaataaacatgaaaatgcagtaactaggaagtgatcctaggtcgtttcccaatgagcaatgacaaaccaaatgttcataatatacttgcgcagtaacagtaacgattggggggggggtttgtttgttttgtgattaaagagcacaacaagtaaactggaatatgaaactactaatattaaaaacggcgtgttacctctg

SEQ ID NO: 34582 - DNA, 429 bp, Glycine max
  unsure at all n locations
tttctttgtgggttgatgagttctgtcttgcagaatgtcgtgatcactggctgacatattctcaattagcttagttgcttcttccggggtcttcaactttattttttcccctgcagaagcatctagtagttgtgtggtttgtggtctcaacccatctatgaacatattcaattggattggctctgaaaacccatgggtgggagttcttctcaataaacctctgaacctctccaatgcttcactcaaagattcatcagggaactgatgaaatgaagatattgcagctttcccttccacagtcttggactctggcaagtatttctttaggaactnttcaacaacctcttcccaggtttttagactgttacccttagaggagtgaagccacctcttggcctctcctgccaatgagaatgagaataggccgag

SEQ ID NO: 34583 - DNA, 426 bp, Glycine max
  unsure at all n locations
agtttcttcttgactaatatgatggggctggcatacagattggtgctgggctggataaagccagatgacaacaattctctgaccaacttctctatttcttccttctggtaatgtggatacttataaggtctcaaattacgaatttgagccgcaggtttggtgataatcacatgatcttgtctcctcatgtgtggcagcccttgtggggtctgaaaaactgacgtgtatgcctccaacacctcctgaacatattgtggaatagtgatttgttcttcagaatgctcaacctgattgcactctaaaataaagccaaggccttgatcttgtaaggccccttggatgagcttaatagaagccgatgccttgatcattnttggatctgccttcagcactgtagtctctccttgtaccttcagcactgtagtc

SEQ ID NO: 34584 - DNA, 420 bp, Glycine max
tgcattgatgaaagtgcatacattaaatccacatgtttgtttatacaactgctagtcttcatgttcatgtaaattacaaaaacatttaaaagatttgaatacagctcatgcagcctctttgcaagctctttatctgaactctgaagaatgatcaatggacataaaactgattaatactgtgaactattaaggagttactgtagcattgcgcatgctcagcaaagctatcaagtaaaaagattgaaaatacaaagacagcattgtatgtgcataagaactataggatttcttaatagaaaggtacatcagataaaatcagattaaaggaaggttcttgtttggcattaccgattgagtcacccggaggcaaggttcctaattattctttgttgaaaggtgatgaactctttggatatttga

SEQ ID NO: 34585 - DNA, 324 bp, Glycine max
ttttgcttatccttgcattgctgcatgtgtggctcgtgcctttcgcggtctcatatttgacatatgcagggagcatatgactaagatgtggtcctgtgtctctggagacttcatggatatgtgtattgggatgtgaaaatgtgtttctggccattgctccttttttagcatcgttgattgtgttgaccaactcatagcacatattgttcacctttatcgagttgtatatgttcatatggatattctcacgagccatgagttgctctgatgttgcataccattatcgtatgatggactgctgcgacaccctctacccctgacata

SEQ ID NO: 34586 - DNA, 418 bp, Glycine max
ttctttgagttgcctaatcttctttttgttggcacttgctatgaggatgtcatccacatacaagagaagataaagaacacacattttcccctttttcaggatatatacacagttgtcatatttgtttctaatgaagccatatctgatcaagaactcatcaaatttcaggtaccacattcgaggactttgcttcagtccatacaaatattttttcagcaagcacaccttgttctccccttcttcaaaaccttctggctggttcatgtaaatggtttcctttagatttccatggagaaaagctgtttaacatccagctgttcaagttccaaatcatactgatttaccagaccaagtatgattctaaatgagcaatgcttcacaactggtgaaaaaatctcattgaatcaatccttcacct

SEQ ID NO: 34587 - DNA, 435 bp, Glycine max
agtcttcaacgttcattttcgagcgtctcgataagttacgggactcaatcagacatccgagaaaaaagttattgtcgtttgaattagctcagaagttcaacattcaatttcgagcgtctcgatatgttacgggactcaatcagacatccgagtaaaaagtcattgtcgtttgtattggctcagagcttcaacattcaatttcgagcgtctcgatatattacgagcctcaatcaaacatccgagtaaaaatttatggtcgtttgtattggctccgagcttcaacgttcattttcgagcgtctcgataagttacgggactcaatcagacatccgagaaaaaagttattgtcgtttgcattagctcagaagttcaacattcaatttcgagcgtctcgatatgttacgggactcaatcagacatccgagttaaaagtta

SEQ ID NO: 34588 - DNA, 430 bp, Glycine max
  unsure at all n locations
ttcagccaattcacccgacaataactttttactcggatgtctgattgagtcccgtaatataacgagacgctcgaaattgaatgttgaagctctgaactagttcaaacgacaataactttttactcggatgtctgattgagtcccgtaatatatggatacgctcgaaattgaatgttgaatctcaaagccaattcaaacgacaataactttttactcggatgtctgattgagtcccgtaatataacgagacgctcgaaattgaatattgaagctctgaactagttcaaacgacaataactttttactcggatgtctgattgagtcccgtaatatatcaagacgctcgaaattgaatgttgaccctctgagcatattcaaacgacaataactttnttctcggatgtttgattgagtcccgtaatatatcgag

SEQ ID NO: 34589 - DNA, 375 bp, Glycine max
acacaagcagatggagaacagtcatcttttgcacaacagggaacattgcagttcaagtatcccaagcacatggcaggtactgattttgatgcaacggcatcttattatcacaataaaatgctccactatgtcgaaggcttgggcaactgatgagaccgtagcctaactctcttacggcccttggaaacagcgaatgcagacaaactatggacagcgagatctaaaactgacaccaatgcatgcatcaccggaacgaggggcgcccgttcaacgctctaaaggaccaggaggatgtaacatgaatatttgccacctaaagaaacaagtaagaaacttaaccccactagaaagcccggcccggacattctcacattg

SEQ ID NO: 34590 - DNA, 427 bp, Glycine max
  unsure at all n locations
agcttttagttataattcccaaggtggtcatatctctcttgatggtttctagaggtatcatccccttcgacaaacatattgcagcagtagggactaccagcaactatatgttatcaaagagaaaaactctagatgagggttcattgttatcaagcaagtcagagacccagcatgaccacagattcacctcaactccttatgttcccatggacccgggtatagggccccttttcaattcaccgtgtgtgcaaaaaaggtgttggtgttgtgtgcatcaaatgaatgcatatttatcacatgcatacattanaacacgcttanagcatcgaagaagtttatacaagaacatataggaaaagggaaaccgatgatagggaaaacacaacttttgcacaaaagaataataggcctaactctctaanaacag

SEQ ID NO: 34591 - DNA, 427 bp, Glycine max
tcttatccaaggctcatcttggtggtgaagctccttcttccatgacttattccctagtggatggcgcctcctctcacctcttctcctttgtcttccactgcatctccatggtggaaaatcaccattaaaggacctcattgaagctcaaagatgcaacctccatagaagccccacaagcaagcttccatcaagtggtaatcagagcacaagagcttcaagtaggtgctccttaaacctccattaattttttgctttaccttctcttccattgttgtttcttcattttttctccatgtatctcctcacatgtcttgtgataaatgtttttaacatgattctttagagtttccaccgattaaacttgctatagaagctagatttgattttctatggttcaaatttcttgttcttgttgttgaaccatgaa

SEQ ID NO: 34592 - DNA, 439 bp, Glycine max
agctttgagatggagttcatatatgaatgtggctaaacatactacattttgcttaggagactcttttagttaaggttcatgattatgaatttaaaaatttctaaacaatgtaatgcatctttcttgttacataatctgagaaatttaaagacattaaaccttcaacactcccgacatctaattgagatcccaaacatatccaaggaaaaaaaaaacttggaaatgttaatctccaatgttgtgaaagcttgcatcaggtccatccattaatgatatctcttcccaattctacacatttggaattaagaggctgcatacagattgaaaaccttgatgttaaatcaaaatctcgacttcgtgaaccttttctagacaatcgtttatctctcaagcagttctcagtgaaatcgaaagacatggcaagtttgagttacatgac

SEQ ID NO: 34593 - DNA, 429 bp, Glycine max
tgaaggatccgagaagcttcttcacaatagtttcttttatacttttcatcggcttgtttcaaaagaaattttttttacctaaaattagtcttgcttttgcttattttaattgttgaaatttgttttacttatgaggtgtttgacaaaatgtttctaatagaatcaagatcttttttggtttaaatttttagtttcaatttttgtatattgttctttttttgtaaaaggcttgactaggttacatttctatgtttcatttgaacatgatcttattaagcttgaaggatccgagaagcttcttcgcaataatttctttcagacttcacattggtttgtttcaaacatgaaatttttttacctaaaattagtcttgcttctgcttattttaattgctaaaatatggtctgcttatgacgtgtttgacaaaat

SEQ ID NO: 34594 - DNA, 316 bp, Glycine max
agctttaagaataagatggcctcagcaaattccttatttccagaaggaaattctatcaacagaccttcaatctttaatggagagggttaccactactggaaaacccgaatgccaatttttatcgaagccatagaactaaatatttgggaagccatataaataaggccttatatacccaccacagtagaaagagcttcaatagatggtagttcatccagtgaaagcataaccatagaaaaacctaaagatagatggtctgaagaggagtataaacgagttccatacaacctctaaagccaaaacataataacatctg

SEQ ID NO: 34595 - DNA, 423 bp, Glycine max
tgtgcaaatcaaatcactcctacatctcatttctattatgcattttctttctttacccactcctcacgtttggttttttagggaaaaacaccataactaaacgcgccgcaagggatccctatcgcaccagatccaaatctagaacgatgggtgatcaagaggagacgcacgaacagatgaaagccgacatgtcggctctgaaagaacaaatggcctccatgatggaggccatgttaggtatgaaacagctcatggagaaaaacgcggccactgccgccgctgtcagttcggctgccgaatcagacccgactctcttggcgactacgcaccatcctccctcaaacataatacgactgggaagggacacactggggcacgatggcagccctcacctgtgatacaaccgagcggcttactcttatg

SEQ ID NO: 34596 - DNA, 573 bp, Glycine max
  unsure at all n locations
cgcgcacccacagcaatacatagacnacgcaccgctaccgccatatncanncacccccaagcgagganaattgagccagaaacctcgacaatcaaggcgaaacgagcgcggacnccgggancctctagagncgacccgcaagctatgcagcttcaacatccaagacatcaagagaacgcgaacacacacacgaaccagcgactacgccgacaccgcctctgaaagacaaggaaaaggcactggcagcaaaactaaacaagctctggactgcatgcgcaccgacaccatccgagcacgacacctaccagacgcaggccgaacacaacccagatacgacgcccaaacatacgctcgcatacccacaaccccggcagcgccaccgccggaacaacagaccttcacaagaacaaacgcgaaccccgaccaacacccaacccggcccgcccaatgcacccaccccacgcccagcaaccacaaacctaacagccccccgaggagcgaaccaccaaaagcacgccgacgccacacagacacgcagacacaggacaaacccctcacgagcacagcccaccc

SEQ ID NO: 34597 - DNA, 405 bp, Glycine max
tatcaagctcttcaatgagagatttgttatttactgtttgcatttccaggctgctagtgcgggtttctatctggacataacaaaagttattaagacaaaacaaagtaagaggccagtgcttttcaagaactcctacacctgaaattatatcacctagaaaagcaaatagaactgaaatagtgaaatctcataaagcagaaagcaacttccacagcagcacaaaatggtcactgtagaaataattgtgaccataattcaactttacaaaggtaaaatccaattcatattaatatcattttaaactcactgaaaatatttggcatgaaccaactgtcccaaaatatttggcgtgagggtgcgggtgtgtcgctgccgttcgacgtcactgccattcctcgctgctgg

SEQ ID NO: 34598 - DNA, 393 bp, Glycine max
tgtaagtatttgttggtataattcgcctgttccattttgcttttattgtctctagaggttacttcctcgttgacatcttttgttctgaatggaattgccataacaggttcgctgttactgtctttgatatttggtagctgacattgtgttgtgggaggtaattccgattggattaactcaccatccttcacttgccaatttgttatgacatttgttgttggatcacctatgatgtcttgtttccaagggtaatctatatcctttctgatggcataagcatgaaaccaatcaaagaaaacgacatctatatttgactctgtcgacaaattcgtataacttgtcttggattcgccttctgtctgtacccttgtaatgttggagaaaccatctcct

SEQ ID NO: 34599 - DNA, 404 bp, Glycine max
agctagtggagccgaggcttccgcacgagagaagagagaatttgaaattttattctttcaactaactaaaattccttttaaaattctaaaattttgaattccttttactaaaatatttaaacagttacttttaataaaaaagaatttaattccctataaaagatacattacttagttaaattatcctatccaaacacacatttttaacaagaaattgtagattgattgctctacaattgatgtatttaattaaactatgaactgaggaagaattctatttcggaacttctgttatgtagttatgaatgattattaaataaatgataggtgcacaagtgacaaatatgagagtaaagttgaacattttttttaatctgctccaagacatggttctcacaataatc

SEQ ID NO: 34600 - DNA, 415 bp, Glycine max
taagggtccttagtggcataatcacacattatattttgtacctctaaaaatatcatatgatataagaatcaaacttatataatttcctaccaactaaacatgtgatgattaaagcctatgaataatattttaatttctttattagataataataataataataaatatccttgaatacatcgtctcgaagttgcatacatacgtagccacaaataaatgttacatatgtaaattatatcacagtaattctaaagaataaataatctttttaaaaggacaattttgatatattcatatatctttaagtagatataatttttaaaacataagatgattataggtattttgctagatatcatatagagataatgatatattaaagttgatgtaacatatccttgcctaagtgatcact

SEQ ID NO: 34601 - DNA, 428 bp, Glycine max
agcttgtattactactaatgtatgctaatgttggtggcagggaagatgcaagtcacgaatgagttattggtgaacaatagctattgggctgaaagagtaagcacggttgtgctttataatcatatcttctaattgttagggataactgcgtaagtgcatcctagcttgtgttgtgaatcgtaaaaatgtatgccctggaaaggacatgtttgatattttatttttgttggaagagtcatatagtaaaattatgattatttagctactcattttgtgttgtcactgttttaaataattgaattgcctttccattcaatgccattgttttgcactggtttttattatccattgctaattatctgaagattatgacgtgggaacttgccttgaatctgtgcggctttgacgagaaacatattgtagcatat

SEQ ID NO: 34602 - DNA, 403 bp, Glycine max
  unsure at all n locations
agtcatcaagagaatataaatttgtgactatggcatgagntncaaaaaatcatccttcaacaaccatattatcaatcatctttgaatcatctatcttttacatcatctttcaacatccttgaatctatctttcaacatctctcaatatcttctttcatctctttcaacactttcaacaaaactttctaattcatttctcttcatctttctaaaagttttttatcaacactttctcttccaagaaaagttctttgttaaaaaacttgtgttattcatctttttcattctcttctccctttgccaaaagaacaaaggactaaccgcttgaattattttgtgtctctcttctcccttacaaaagattcaaaggattaaccgccttagaattcttttgattcttccc

SEQ ID NO: 34603 - DNA, 351 bp, Glycine max
tttcaagcttgccttgccccttgatatattcgagggactcatggtcactatgaatgacaaattccttgggataaaggtagtgttgccatgttttcaaagcccgcactaaggcatacaactccttatcataagttgaatagttaagggtaggaccacttaacttttcactaaaataagcaattggatggccttcttgcatcaacacagccccaatcccaacatttgaagcatcacactcaatttcaaaagatttttgacaagttggcaacgcaagtatgggggcattagttagcttttgcttaagaacattgaaagcttcttcttgtttctctccccatgtgaaaccaacat

SEQ ID NO: 34604 - DNA, 431 bp, Glycine max
  unsure at all n locations
ntagctttgtccccaaggcttcatgtagacttgtcctttatcgttaagngaacctcggatccctatctaatacaatactagaaggaattccatgcaaccttactactcccttgatgtacaactccactagcttctacattctatacttcatattcaccggaataaaatgagcagatttggtgagtcgatctactatgacccacacaacatcatgtccacgactagtcttgggtaaactagatacaaaatccatagatatgctctcccatttccattccggaatttccaatggcttcaattctcctgatggtcgctggtgctcagccttagccttttgacatgtcaaacatcttgctacatattcagctacatctttcttcatgcccatgccaccaaaacttctcttcaaatcttggtacatcttagtcatt

SEQ ID NO: 34605 - DNA, 327 bp, Glycine max
gaatctgtacttcctaagagggagcgccacccactccacgtcattacaaactacctcatttcttcctctatagcccttagccgaatacaccttcgatagggtctctatttgacgcttaaccctctcatgcaacttgtttacaaactctgacctacattacccttctttatgtataaaataagtgtcgagtgggaggggaatgatgtctacaggcgactagggattgaacccatagacaacctcaacacgagatagcttgatggttctatgaacccccctatatgaggcgaagtgtacatgacgaagatactcatcccaagacttatg

SEQ ID NO: 34606 - DNA, 408 bp, Glycine max
tatcataatcgattacatagctctttttgagacaattattgattctttaggagtctctactttaatcgattacttctctcttaaaatgtgcttcagaagtgatcacaacttttaataaaaatagaataaggtgtcgtaatgggtgcaagctatgtaattgattacatcaagaatctaatcgattacattgttcttgaaatttttccagttgttgggaagaacactttaattgattgaaatgataatataatcgattacttcttccaaataatcgattacattgtatatttaattgattacatgcggttataactgttttctctataaatagacaccttgtgttctgccttttaataacatctaacaacttctgaatgtgttagaattatgagctaacattagtaaaac

SEQ ID NO: 34607 - DNA, 318 bp, Glycine max
  unsure at all n locations
ttgcattttactttgttgctcgatgtgtcattattttctcctatttcttaacccttttggtcaccattttaattattgattagccttaattgtcaaattaattatgcagctttatcatttgggcctacttgactaattttgtgtttttaatttaatttcaggagaaatataagccattgggcttggacatgaagagagcagacaattttattttattaaatcttatcttatccagattttatttcgtccagattttatttcatccaatcttatcttatcttgtccagattntattttattccatttatgggcttggac

SEQ ID NO: 34608 - DNA, 422 bp, Glycine max
gcttctacaatctccccctttttgatgatgacatcttctgaaatcaagaaacactcacacactttttcctagtcgatcactcacataaattctccccctttgtttttgaatctatgcttatcttaaaaataagttgattactcatgtgaattcttgatttaatcccatttctctccccctttggcatcaacaaaaagccaaagtgcgtatcaaacttaaggtatacaaatataacttaaacatccataaaatgttcatgaaaaaatatcaaccaaatcatgaagcaagaagcaagaaccacgaaatccatgaagcaaacaaccatgaatagattaattataaactccacatggtcaaataacatacttaatattggtccacacataccatgcaaataaggaaatagtaaattgttcacatac

SEQ ID NO: 34609 - DNA, 570 bp, Glycine max
  unsure at all n locations
ccaccgcaccgcacgaacggtagacggacgcgcccgataacgacacacnccncannnnnaagagcgcnnnntttgggcctgataccntcgaagcncaancgancanggcacgcggggaaccnggagagccgaccagcaggcaggcaagcttgcaatgaggccgcagaagcngncgcagaggcacgacacgagccggcggacacgaacgaaacacacccgcagcagacacaagagagagaccaggagccgaaggccaacaccgacacaacacagcagggcaaccccaaccgaagctgacgcgacaccccggcgcaacacacgacaacgacagaaggccggagccagcagcaagacccagcaaccaacgcagcccaacagcacaagaaaagccagccataacaggagccgagcacaggaaggncgacgatacacacganacacacaaccgaagaagcaccgatggcgcccgacacagaaaccgagcgccgaaaacaccgaacgcatgcgcccgaccaacgagcaaccagaagacgccgagaaaaactgaaacacaccccggacgaacaaacn

SEQ ID NO: 34610 - DNA, 342 bp, Glycine max
agttttgagcttaaattctgactcaccataaaccttgacccagggtgagaatgtcaatccttaccctcggaagcataatagaatagaacggaaatttccaatcaaagaaaagagaaggaatatttccaatgatagaggaaaaaagagaagaaaggaaattcccaatcaaagagtgggagatagagatagaaaagaaagaatattcccaaccaaagaatgggagaaagtaaaaagggaaggaagctcctggtcaaagaaaccagagaggtctttggaccagataatatctgaacagtacagaatcgtcaccttatgagcataaaggaatgaaagggaaccacg

SEQ ID NO: 34611 - DNA, 429 bp, Glycine max
tgtagaatggccccacatgatacatgtcagggcttgttttggtttatggataaaagggatgccccacattatttccatgacacaaatgcaaaaatgacgatttggaaattttatgcaaaactggttatgcatgcacctatgcggacactcaagtgtcaaatttttatggtcatgtgatgctagggctcaggattcatttcctctattttagtcaacccaacgtttccaaaatatgttcttttatcaatttgtgcattaatccgaatccattttgcgcgtctgggaaaatcttcacagcattcaaccttcaggtgtatacacactttttcaataactagttatgatcagtgaatttttccaaagaaaagttggaagtcatctcttttcaaaagcatgttggtttttcagcttgacaacttatttgttctt

SEQ ID NO: 34612 - DNA, 422 bp, Glycine max
  unsure at all n locations
agtctttcttgtggccatttcctgcgaggacaaacattttgggaagttagttttacaagataagcttttcttaacacaaaaatgacatgctaatccctccgatttagaatgaactcatgtacacttttaatgtaaaatatttatgcacatgcgtatgtgtagaatatcccactatttatgtcaacgtacaaggacatccaacacattccaactgccatacatatatatttttgaaaagaacacacattctcatgctctangcactgcgtcanaactcacacctaatcacatcctanatattttgctatcacaaactacctacacatatttganacatatatcatacaggctntcattgtttcactcacatttatttatatgcatattggagagctaattacgtcatgcacatacttgcattc

SEQ ID NO: 34613 - DNA, 419 bp, Glycine max
  unsure at all n locations
nggattgattcagtctaactagggatngaggggtagttatntattctagagcatagaacacaaaagcatgattgattagagaaacatctttatatgcattagctggtctgttagaaagacccaacatttctacctactgctgtcaattttatttacttgcatttttactatttttagcccagacttagttcaatcctgttttaaatcatcaaatatcaatgtttctttcgacaatgccttatttctgaatttaaccttgtcttagactagttccctgagttcgatactcagattcatccgttttgattttaaatacttgatgatccgatgcgctttccggcaaaccgaaattacatcagttgttccttagaaattcgcaacaagagtgtntagccaaccatatagaaaaaccctaacac

SEQ ID NO: 34614 - DNA, 424 bp, Glycine max
  unsure at all n locations
ccngctacctcgaaaccagtacgttgtgtcatatatactgactcctcaagaaacccatatagcaaagcattgctcacattaagctgatatagttcccacccatgggaaagagcaagagtgatcacagcacgaattgcgacaggcttgaccacaggacacaatgtctcatgaaagtcaaaaccatggactcgatgaaagcccttagctaccaaccttgctttgaactagttgatggaaccatcagcattttcttttactcagaaaaccaacttacacccaatggcttgcttattacaaggtacgggaactaagtcccaagttctgatctcagcaaagcaccatactcttgctgcattgcaccaaccaatccgaatcttctacggcctgtttaacattatcgggtcccgatcgagcagcaataacn

SEQ ID NO: 34615 - DNA, 430 bp, Glycine max
  unsure at all n locations
gcttgagacattcattcataggggactgagaagagagggtttgttcttattcaaggtcggatgatgaagaggcagttcggctttgtaaagacagaaagaagttcatcagacaagctgttgaacatagaactcaatttgccacgggacacatagcatacatagaatctcttaaaagggtttcagctgcacttcgcaattacattgaaggcgatgagcctcgcgagttctcattagacacagtcatcaccccacctttcacgcctgtgaagaggaaaactggctcaggattcattcccatatcagcanaaccctttgctacaacaggagcaattgagtttgggatctgaccaaactctactttgaaagtgaattaccttaggcctggtggtaacccagcaatttcagttgaggaaaggcctcaatccccgga

SEQ ID NO: 34616 - DNA, 379 bp, Glycine max
agtttccattaccaacacacgttgattcaacatcagttcaatgctcaatgtcctctacaaccgattcaattattatcggtacatcttctgctctttatgttccattctacatctatatacatggattgcccatgggcttcatgtctcaaagtgttggccacagtatcgagaagcatattgggaaattccttgagtacgatgtgaaaaatacttcgagttattggatgtcatacatgagacttcatgtattgctagatgctaagaagtcattgatgaaaccctcgaaactacgaagccatgagaagagctctctgaagttatctcaagcatgaaacgcacgccctttcgtatctttggtccaatgggcacaatgacgata

SEQ ID NO: 34617 - DNA, 423 bp, Glycine max
  unsure at all n locations
tgtcacttatagtngatgcttatgtcatctcttcatttgatatgcaaacaggtggcttttacttatgaagatggacgccctgtagaaggtatgggtgtagggagaaagataatagatagggtgcaggagacatatcattctgacttaaatggtaaggactttgcatatgatggggagaaaagtctgtttactgttggctctcttcctcaaaacaagcttgagtttgaagttgttcttgaggatgtcacctctaacacgtagaagtaattagagagcatttagttgttgttttggctcttcaaattggttttcgtactattgtttcaatagcctatgatttattttttgtcttctatgaataatggcaattgcagccctgatggtctatgggacaatgagagtgactcaaagaggatgcgaccc

SEQ ID NO: 34618 - DNA, 419 bp, Glycine max
agtgtgtatttgaagttcttgagaggtgctgaaattggttaggcaatagcaaaagacatattcccctgctttcatttactggaagatcaaacgtacttcatctctctcttattttgattaaacattgtaatctttatttttttttatgtgactacaatgtacattacattctcatgatagcatatgtatgatacgacctctattagttagctaacaagtgtaatttattataattatgtagaattcattttttttgaaggttccattggttcttattctaaatacctattcttattttataacatatatggtagtagctgcaacatataaattggcattgaatcttacgatatgcttcttcccctaccaattattctttcagttagaacaatcactagtagttatcttcttgatttata

SEQ ID NO: 34619 - DNA, 414 bp, Glycine max
  unsure at all n locations
tatcttacctatttatctcccagttgtctttgcatatattcaatagataaaaaacatgaagttctaattcaagatgttttctttgttgcatgggcataatgcaatcactctatgtctagcaatgattttattaagatgtccctacctttgagttctactaaaaattatcctctctcgagcgactaatctctaaaactgatgcatataaaaccttcaatgtatttctactaaggattaccctctttcaagcgccaaacccctaaagatgatgcaaggatgaagcatataatacatttgttggcattttaggcctgccaagccctaactaaaggggtttagcctttcattgtcatgagagactcttacactttanggggttgatatggatggaagaagatggatggatagaggaag

SEQ ID NO: 34620 - DNA, 473 bp, Glycine max
  unsure at all n locations
aaacaaatgaactgacacgtcgancacngngaactnagaaactccgctggccctgctcatcgggaaaagancttttcgagttttttgacaccccctccagcgctctgcttgcctatgagtccatagtgccttcccttctcggaacatgtctgacaaacttcttgcaaagccctagccaatccttacagatagttgcgcgcatcaaatttgtacgcctaactctacattatgaattaggttctcataaagctgaacctatcgttttttaaaacgctataatgaccaacggctatggtgaccgacaacattgctcgattctgataacgaccaaagcaagtcgctaaccatgcgatgatagtgccagtgcgcgcctgagcccaccacttccttccacctaatatccaatagctacaactcacaataatgttgcccactacagctctaaaagcaattatacaactgcacttaacccc

SEQ ID NO: 34621 - DNA, 352 bp, Glycine max
  unsure at all n locations
agcttcgttattcagctctagtgctggaccttgccgtgactttttgcttcctggaccaccatgatatcaagtttgagccaagaaagatagctgctcctgatgtggaacgtctttcatcaatatctgatgcccaatcaacatcatagaaagcatagagtgccatacgttgtgaaacagaagcagggcgaaggaataaaccatgacaaatagtacccttgagatatcttaatatccttttgaccacaacgcaatgagaatccaatgaattagccatatactgacaaaccttattaacatcatacctaatctcacgtctagtatgggtagcatactggagggcacncactactga

SEQ ID NO: 34622 - DNA, 433 bp, Glycine max
gaaactaagctgtatatgaactttctcttcattgctactattatctttattagtttcaaactatgcttccaacatagcaagatcatgatctaaaacaccgaggtgaaattggatttgctcatttcagtcagagaagttaagcccattaaaattggcacatatgatacataagaattcagtgaattgagaacatgtattacataataaaattcacataagtgtttcgagacataaaatacatgtcatacacttgattcattcagataacggtcaatgtatattaatgttctcctttgggtgatacaccaacacataacatacaaacataatgatgctaataaaaattcttaacattatttggcaattaaatatgcaccaattagtagtatctatgtcctttgggcttatacataaaactaatgatacacacaaa

SEQ ID NO: 34623 - DNA, 427 bp, Glycine max
  unsure at all n locations
agtcttatgatgatgaattaagttgattcaagtagttttgatgatgaaaaagatgatgacaaaaagcccaagaaaatgatttcaagattgagtcaacaagttcaagatcaagattaatttcaaatttcatgagaagaaatcaagaagattcaagaatcaagagaagtttgatttcaagattcaagagaagatgaattcaagattcaagagaagaaattaagaagacttcacgctgattagaaaaaaaagaagaagacttcacaagggaagtattgaaaagatttttcaaaaaacaaacatagcacagttntgtttttcanaagagtttttctcanaattttctaagttaccagagttnttactctctggtaatcgattaccagtttcctataatcgattaccagtggcaaagtttgatatcaaaagc

SEQ ID NO: 34624 - DNA, 423 bp, Glycine max
taacaccgatgactatcccaacatagctactgagtatggaatcagaagcatatcaactgttttgttcttcaaaaatggagaaaagaaagaaagcgtagttggtgcagttcccaagtccactttgtccgcaacagtggagaaatatgttgatgtataaactggaaaggaagaaaatgctataacaaggaacgcttgatcataaattatggaccatcttgcttttaatggttttcaacacttcaaaaagtactttgtatccacatcttttacaacatttgttaaagattacattgtataaattccctcttctcttctctgctgttccttctgccatacattacagttcacttcgccaaattctcatgccaagttaatttggcaccattactccaggtttgggagtaaactgaaatttcaatgtct

SEQ ID NO: 34625 - DNA, 420 bp, Glycine max
  unsure at all n locations
agctttgctgcaatattaaaatattgtttaaaaccaatcttgggccttcatctaaaaatttaagctggtagtgtttggtgaagacacatgactggttttatatctcgaatacttcttacttctcttcttttccagtttttcttggactttttgtatttagtctctcttttttattcaaaggatttagtatcctctccctggttagtggttgttgctcccttttgtctttaatgaaatttcttcttctataaaaattatttgttttgcttacttcctggcataggtatcccagtcatgaccagagctcanacctgccaccctttggatccactatcagctgctgaaatatcagtagctgtagctacagttcgagctgctgnngcaacccctgaggtagatttcttgattntctttcattga

SEQ ID NO: 34626 - DNA, 419 bp, Glycine max
tttgttgaacaaagaaatttcttagtgttgaatgcattttaaatcttatttcactttcaaaacttgtaaacacagtttttcagtttgctaatttaaattagtggacaatgatcttttctattaactagatagtaacattaaaaacaaaattagtacagcattaaaaatagcatggtgcaagtaatttattcaaatttgtaatatgactgccattttagttgagacaacattatcgtcaacaagataatgtttgtggcggctaactgacatctctatatcattaaactaatgcacctgcaatgttcatcgaatcaaattatatttgccatatcaattcgcttagctactaaatgagccttgatctacacgtctgttccctaattcgacgatccttggagccatcataatcataccgatta

SEQ ID NO: 34627 - DNA, 378 bp, Glycine max
  unsure at all n locations
tcaagtttttggttggtaagaatgcaaaaatataatttctaaattgagagatatattttggtttctaagaatatttatagtgaaaataaagatgcaaaatttgacacactttcaattaatattttttcatatgttagaattcccaaatctaatttaaagttaccctgtaaccaaaaatctgaacttatctgtttaaggatccaaactcttcctatttggacaactactcgttggctcaattgagattntgagttgctatgagaatgaatttttagtaactaacggatattntcattgaaaggaaaacaaaattttccataatgaacacatgatgttggaagaccataacaaagtttccactcatctagatctttgatg

SEQ ID NO: 34628 - DNA, 430 bp, Glycine max
  unsure at all n locations
tactcagcttcacataggagctgcatcatgtggtatcattagcattttcatctangngatgttcttttgcttcctctatctttttattcggtcaattcactttaattccttgttcttcatcttattctccatgtatatccttcattgtcttgtgttttgatgctgtttagagtatattcaaaaaataaaccgattaaatcttagatctacacttgttcttgcatttctatggttcaaattttatatatctactcttgaatcatgtttttgtgttgattttaggttcaatcattttccagtcataatcttcttgtactgaacctttaaatctaaattntattccaaaatattgattataaaaaaagcacanaaatctaagtgtaaatcacttaatctatgttgtcttagagtcatgtntagtcataataat

SEQ ID NO: 34629 - DNA, 434 bp, Glycine max
agctttggttatttttagcaacgggacccttttaatttgtataatttattgtgtggaaaaagaaaaaacgacaataataatatattgcttaatgtatttgatccagcttgcttctgttcttcttggcgatctgtattctgtacagagatgatccatattatatcatactctatatatttttctatgatccttgatttaatgtgactgaaagagaataattgagtggaaaagaacaacaaaagcattgaattttagtcacttttactgagacaacgttatgaaatagctgccatatatggtctccataattgtgcttctgtatttttcttcttcaatcattatcaccaaatcattatttggtatctaggtactctacaacggaggaatcagtagatatacgtgatgttctatcattaggtctcattacgcatcat

SEQ ID NO: 34630 - DNA, 447 bp, Glycine max
tctataatactcagcttaataaatgagaggaaaaaaacaagagttcttgtaatatctgtgaaataatttttgtagagattattttcaggagtagaaaagtcactccgttgtttagtaattttgaggcatttaattaatctaacgtatcagattttgagtttcacacacaacaataattccttttactttggatcacttgttattgttgcacgcgtagctttctcacagtgtgaaggtgatgaaactggggtttagtagtcaatcttgttcttaattgattgtgtcaaacactcaatgtcatttcaatcccccattctctccccctagatttgggcttgcctaaaacaacaccaactcaaacctaacacctgttcacgaaaaagatattccaaattagggaaaggggcaattgaaaagagaagggtctaacggtaaaatgatcaatga

SEQ ID NO: 34631 - DNA, 412 bp, Glycine max
  unsure at all n locations
agcttgtgctttataaatcactcctacattntatctctagcatgcatagtatgttggtctcgtcctttgtcacgggaagccggaaggtccatctcaccttcttaattgtacacatggagcactgcgcccccaaatgcgcaagtaagaagagataattttccgggctctcgtgtccgtaaaatgcattcatatcatgcatcgcataagcatctcttcataacatcataatggacatatcctgcatttgtccggtcatggcatcatcatgcatatgcgttcaacaaactttntggtctgcaaaattgcataccatttgttttcatgtttgctcatccttgcgtttcctctacaaaacataaaaacatataatgtggggagcgtgaaacttcacactacattcttagtttcatgt

SEQ ID NO: 34632 - DNA, 426 bp, Glycine max
tgaaggtgtgtagcccaccatcttttcatagtagaattctggttatgtgtctactatcattgtcatcattttttttctccgtcattgaggtgccacttgagctgccaggtctctccacctttgggcgtatttttttgaaagatctgtgccccctttttgcacatgttttgtagttgcatcctatccgaagacattatactaacactgcctaacgaaggcaaccactaggtccttccaagaatggactcgggaaggttccaagttagtgtaccaggtaacagctaccctagtaagactttcttggaaggaatgtatcaacaattcctcatcttttgcgtatgcccccatcttccgataatacatctttagatggttcttggggcaagtagtccccttgtacttgtcaaagtccagcaccttgaactt

SEQ ID NO: 34633 - DNA, 110 bp, Glycine max
agcttggaatctctgtattactggcgccttctggtcatgagctagcccatcaaccgatgaccatagtttcagaacgatacattcgtccaaaccaagaccctccttctgtt

SEQ ID NO: 34634 - DNA, 427 bp, Glycine max
tgtccctctactggcgaatcaattagggtcaaggacttattatgggataattgtgagctcaggagcgacgaataaatcctttcatcactcctcattactcccgagctcacatttatttcaaaatgagtctaactggatcctacaaaatcaacttataagatgaggattatcttcacttatatattctactttgactatattactatgcgaggtaagatctccaatgcagccaagaattaaacatcttaaatgagaagcttgcatagcttacacatgtgtagaagattcgataacatgtgatactataggtccaaccattatagttacatagattgtggtactattcggtgcttgttacggtacaggtttggtacatgtacgcgaccttgacaagatatggtgcgtgggaatatgcatgtcggtacgt

SEQ ID NO: 34635 - DNA, 432 bp, Glycine max
  unsure at all n locations
agcttggacgttgggcgtgttttgtgggactttgttgttgagaacttttttggatttaaaatattgcttgtgaacaattttatttgcattttccttgtactttattctcaagcaataattattgcttgtaaaagcaacccaaaattatgtaagggtttgattcttaaatttaacaacccaaaatttaagaatccaatcatacgacagttgtagaagttgctctagcattgcaattatgacaacaatgaaactcccctgaccaaactctcgggagatgctgtaattattttcgattagttaattacttatatgtctaattaatatgattaatcacttatataattaanaaatattcaatatgtgatgttaaggttatatttatcgagatantttaattaatctttagttcttgtatcgatttacaaagttatt

SEQ ID NO: 34636 - DNA, 439 bp, Glycine max
  unsure at all n locations
taagaataacatnntttttaatttggtttgattggaataatattttattatatatatatgtgcaatataaaaatagaaaaaaataaaaaagtataaactacgtacaaaaataaatgtaccacagaaatcatatactttaaaatgtttaatattcatttatattacatcaattttttttaaaaaactaacaactaaattgaccgaaaattacatcaattaacataattggagtgtgaatgtgtacaaaatgaattaattgtaattagataatataaattattcaaatataaaatgcttcatataaattcgtgtatcattatttttaggttttcatagttctaagtgtttttactatttaaaattattcatcattttcaccttatttttgtttactaattaatatgtttatattatatatttcactcatcatttttaattg

SEQ ID NO: 34637 - DNA, 272 bp, Glycine max
agtcttgtttaatatgtaacaattgaatacagttattatcccaaggtaaatgaaaagacacttattagtcaactatagttcaattatgtaacaactaaatatatttattatccccaagataaatgaaaagatatctttttagctcaaaattaaataattcatccaaataaattctaactcactattgcatctggatcgtaaagggttgaattcattgtactctttaacattggttaatttattatctttaaattatagaaatgagacaatta

SEQ ID NO: 34638 - DNA, 425 bp, Glycine max
  unsure at all n locations
ntattatatattcattnttctttttacagtttcttttctttcccaacagatacttcttctcccccaatcaagcattatttcttcttcttcccccaaaaaagtcattgcacagcccaaatctcccattttcaacacgaaactcaaagtgaagcaaaattttgtaacaaattacttctttcaatttgatatgacaatttagttcatctaagttacgagagcatgcataacaaaatttttactgtcaaatacatccaacaatgtcatgcaattttggtcattntttacaaattgaaaaaatagatgttgggataaatttatctcactttttacaaagagataaaattttatttttttctaatttaggaactcaaatggcagcgcattacaaatttaagaactaaattgagtatttattctataattct

SEQ ID NO: 34639 - DNA, 430 bp, Glycine max
  unsure at all n locations
agtttggagttgcaatagtgctaaggtttctggttttagttactccatattgtcgacaattaacttggggtcctgtcttcatgatttttaagtttaatgtgctaagttgtttcaagtttggtctttggcaagtgtgtacaaagatattcatgacccgctaattaataggaaagattcaacacctataggatatgaagaaacttttagcgtattgctaaattgctgatttcttaatatgatgaaagactaactcaatgatgtctactccaatatcaatgatatagagtcttgggaaattgagggtttttgcttaaaaaaattcaaatactgaaagtnttatttccttaatatcttggttctataaagattccaataaacaagaagaacagagacacttatcttcaaataattatattgtctcttacattga

SEQ ID NO: 34640 - DNA, 426 bp, Glycine max
tgtcatcgtgagacatcagaggctagtattttaatttatgtgggtaagaaaaattcaccaaattgatagagaaaaatctaaaatcatacatcttaggcaaataaggcatgctagcccccaacattattgcattttgattccatctttagacattcaaattgttgtttatttttcctgttatcttttcctttgccttagtctaaatttcaaacttacaattcggtatctctttcttcttttgtttctcctcatttcttaataattggatttgcatcacttaagtacaaccaaagtccctctggatttaattgttgaacttcaatttcaatctttactacttgtgataaaattaggacacttgtcaatctattaacaagtttttggcgttgttgatggggactttggttttcgtacttggttgttaca

SEQ ID NO: 34641 - DNA, 425 bp, Glycine max
  unsure at all n locations
agctttgctataattaattntttggattaaatattgtcattttttaagggaacggattaaataatgtcttaatacttgtaaacaggctaatgtttgtctttagttcctcaaaaataaataatttccttttgtcccttatttataaaaaatgtgtcggatgcaatcgttattttttttatgaccacatacctacatttctataaatcaaagactaaagaaagacaatctattttggagtgattataaaagaacattacccttgcaagaactattttcatattttttttttccttttagcatttgcaatattcttaaacatatgagaatcttctcttaaccattaacattntatgaaattntattgctctcaacattntcatattnttcaagactntacactnttagttnttcatatatttaaactt

SEQ ID NO: 34642 - DNA, 415 bp, Glycine max
  unsure at all n locations
tcacttgctcaaattcggtcagactctcgtaagcagctttttttgagcaagctcgggccaaagaattcacccagcaaagtccaagatatctttccttcccgtctttgtatctgtggattaacagagccctgtcaatatcaaaatagtaccaagtgactgtcaagtgtcaattgcagagaagacatcaatgtattaaaatcagtgggtaaaattcaaaaactattggggaagtgcatacgcatactacttccatgatccatgattgtgatggtttccacatgcacaacagtaaaccatatgatcaagagaaacgcaattntgcggaaaattgtgtttataatggattcaagttaaacatcacaacaacatcagatggaggaatcagtctcagacgagtatattgggctgattcatg

SEQ ID NO: 34643 - DNA, 437 bp, Glycine max
  unsure at all n locations
agcttgtaaaatgatgagaagacagcccacaaaatttcaaacgaaaattcaaagtctaactatagaagctaaaaatgataagttaagacaaataagagaataatacttggaaaataaaaaacttttgacagaattacaatttttggaagaaggagacctcagtcggcctacggcgggctgccacgacatggaaaatttttttctaccccgaatacatatagagtaatagtgattctgataaccggagcaaaagttatggccgtttgcagttatgacaaaaatcaaatntgctacattntgggaactttcaaatctgaccaaactaagggctcannactattttcccacanaatatggatcacaagaagtgactacaaaaaaaaatcagccaaaaataacaactcttgctaccaaaacaaaaaatcccaattaattca

SEQ ID NO: 34644 - DNA, 431 bp, Glycine max
tatgcaatatacaattgtaggcattggtgttattttcagatgcagaaactgctacctccgcaaaggatgctttggatggaagaagcatacctaggtgacagttgtattatttgtctgacatggtatttagttcaactgtgatggacatattggctgtggatgtggtgcatatcctcagattggtcaactatagactgttgtaacttgtatattcacactctcactttggtttatttattatgtagtttatatgctgtttttgaaattgtaattatgaatcattgaatgtgtaaaatacggttagctatatcattccaactggaccaatcataagaataaatgtgttgagttcaagttttttctactaattagtagttattagcacattcattggctctgctgatatggttatataccttatgcattattat

SEQ ID NO: 34645 - DNA, 416 bp, Glycine max
  unsure at all n locations
agtttatttattttataataagagaacaatgacaattgaagagttgattcatgtttactttgatgagtctaatgttttttctccaagaaaggatattttagatgatattgcagaatctttagaacaaatgcacattcatagacaagattctaaaggaaaaagagaaggaagcaatgaagatcctccagtagatgtcaaagcaaataatgatcttccaagagaatggaaagcttanggagatcatccccttgacaacattattggtgatacctcanaaggggtaacaactagacactctctcaaatatttatccaataacatggcttttgtatctacgatcgaacctaanaatctanatgaagccataatagatgcaaatgggataatagctatgcaagaagaaactataccaattg

SEQ ID NO: 34646 - DNA, 431 bp, Glycine max
tttgttgatgcagtttaagaatcccaacgagctcttttgagtcattgaatcaagattcttgttggctattaaagctgtaacatgcggtctccactttctagataaactttgtaagattttatcaatgtgatcataattgtcataatgtctacctagagagtaaagctcgtttaggatgttttggaaacatccaaacatggtttggacatctattccttcttccaaactgaagagttcatacttacgcataagaaggctcaaccttttatgttttgtctcacaggacccttcgtaggtaatggcaaaggtgtcctacatctgtttggcacttctgtagccatcaaccttggaatattcctcttgtgataaagcacacaacatagcatttcttgctcgtgagttgagaagaaatctagaattatgatcatccg

SEQ ID NO: 34647 - DNA, 434 bp, Glycine max
agtttatttataaacaaaccctaaaccctaatttgtcaaatacccattaaacctcaatcagtcaagtaatcctaaacctttgtctttcaaatacccctaaaccataacaaccaaagtaaccctaaagtctaatttatcaaataaccataaaccctaattagttaagtacacataaaccctaattagtcaaatacacataaaccccaatttgtcaagtaaacctaattagttaaacacccataaaccccaatttttcatgtatcccatgaatcctaaattttcaaatacccctaaatagtgattaatcaagtaactctaaattgtctcataatcctaaaccctaattggtcaagtaacactaaagcttaaattttcacatacccataaaccctaattaagtcaaataaccctaaacctaattggtcaagtaacac

SEQ ID NO: 34648 - DNA, 420 bp, Glycine max
taaactaaattttagggcatgttaggcccatgctattgtgcaacacttgggcaacacttgagaatcccaatagcaagctattgtgttggactcttcccttcaaaaaagtaatttaatatcatgtgaatcattgacccacatatcagatattaatctgataagaacagatactacactcgatcttagccaaaaggccgagaaaggcatgagttgcaatgtcttgagaggctctctttataccgaaacatcaagtcattgttatcttttctaagcgatgtaggatttcaatcacagtttaacattggacattgatatatttcatgctcgttggtgcaaacaagggtgattttgatgaatgcattgaattaaaaagaaatcatgtcgagtggttgtgagacggcatgttcttgttctgtgttg

SEQ ID NO: 34649 - DNA, 400 bp, Glycine max
  unsure at all n locations
agtcttggngaggaagaaaaaagtgctgtgacctcattttatagcaagataaccattcaactctttgataaactatttttgtcccagtagtatgttgttagtgtcagatgtgcttggtgtagttaaataaaattctagtcttcttgattttctgtttttcatgggtattttagtgagttgcttatattagatattgaatagtggtttcagctgggtgtgaattcaaaaaatagagctgggtctccattcagttgaaaccagagtctaccctgtgaaaaatcttcaagtctcatattactatgtgttttctattacaaaaatgtattcatgctcatctgattaagaattcagttaataaaatanaaataaaaatcttctttgaagcagtgattgtataatg

SEQ ID NO: 34650 - DNA, 422 bp, Glycine max
  unsure at all n locations
tgtccctgacaccaaaaattgctacaactttataattatgattaaaccaaaggtaataattaatagggtaaaatacgttttcagtccccaactcccggtacttttactagttttagtcctcaaacttcaactttgatcaatttggtctcctgaactttactaacggttaaaaccgtgggacaaaacccactgttttcttctaagagggaccgaattaatcaaagttaaaatacggagtctaataccaacttttaccgaaaataatacaggcactaaaaacatattttaactcaagtaacaagtaaccatagaatgaacgagacaagatacttgtgagcgcgggcatcgacgccgcggtttttgacggagaatttgtctttgggggcgattntgttcttggcgcgttggtactcggcatcggg

SEQ ID NO: 34651 - DNA, 416 bp, Glycine max
agcttgttcgcacatcgtttgcgtgtatgatatccactcgacaaggtttgaagtagaggagaccttcaatcctataacgcaacgtggcggacgaaagtgggcagttaacttgaatggccattattgtcaatgcggaaggtattctgcacttcactatccatgttcacacattattgcagtttgtggttacgtgagcatgaactactaccaatatatagatgttgtttacacgaatgagaacatcttataagcatactccgcacagtggtggcctcttgggaatgaagcggcaattcctccttctgatgaggcatggacactaatccctgacccaactacaattcgtgcgaaaggtcggccaaaatcaacaaggataaggaatgggatggattgtgtcgaaccatctgaccaccgac

SEQ ID NO: 34652 - DNA, 421 bp, Glycine max
  unsure at all n locations
ntagccttaggttgttccatgttgctgctccccctatctctaacaataaattcaaccattgctaccaacaacttcgttatagtagccactgccacacacatacactcttatagcaaagttaggacattaaaaaaaattgaaacccaaagaatgtatcaatattaattcaaactctttcacttggataacttaatcaaaacatttgacatgtgcattatgcagaaagcgatttacaacagaatacaatgaagatccaaaaatctgacttcctttttgggtacagggaatcatcgttaattaacttggatccattctgaaataaggaaagagatgtaatgataagtaaactntaactactaataactacatcataacatagatttcatcagtaagaaanagccaactgatccttgaattccat

SEQ ID NO: 34653 - DNA, 382 bp, Glycine max
agcttgtgtttgtgagcacttcttgtccaatgctaaccattttcctcttccctccagaaacccacccctctaaccagtggccctccaatgatgttgtccttgcacttggttaaaccaagctgagccatcacaatttttgaatgcagaattttctccttcgtggtgaaactatttggcaatttgagaggggaagtgagcactagagtttcaaccaatcaagtggggatagagaacataatcttgtgtgacaaaacctctgctcctcttcattgcatttgagaaggctctgccattgtatgttatgctttcatggaatttccctctgataaaaataacaaaaaacatcagactcattttggcagaaccacaaaaatattacaat

SEQ ID NO: 34654 - DNA, 193 bp, Glycine max
tctgagcatggaaatcacatgatggctcatatctttgcttatggccttaaagcccgctcggctggtacaggcactcacttggataaaagacttgctatcaaaagaccatcacttatttgaattctgaaggcttataccaaacttttgggtgctgacgatgtgaacaaatatagcagcgttgcacttttttact

SEQ ID NO: 34655 - DNA, 366 bp, Glycine max
agctttgaatgttctatctacatatgatgtaacttgaaatcaaggaatattatttatttttattaacttttctattcaatctcatgttggagatacaactattgtcaacggtggagaacatctatttagtagtacattgttctgggatttgtcaacatcagcccttacgagttagaactgacttatgcaactaaaatcagaatacttttgttgaactcattaattatatatataatgaaggccttatggcatttggggtattaccatgactgggtattggctatttattgcttggttggccgatcttataaatgataggtagaagtctcatcttcgtgtgcccaaattgtgtatgtggcattctca

SEQ ID NO: 34656 - DNA, 412 bp, Glycine max
  unsure at all n locations
nttagtatgtttaagattntatttcaagacaattgataatgctatatctgaaaataataaatcactttggttaattaacatgaaaaatgtatcgatatggtcaaagtgaaaaattacatttttaaagatgcgtttttcactttaaaacgattgaaccctttctttctttctttcttttttgttaaagatgacagattcaacggccgaaacaatagacataaactttaaaacaattatataattatgattgttttggatatatcaagctcaaacaatttgtagtggcttttcttttatagaagacccttccaaaagagaaacaaaggatctacatatgtcaaagttaagttggagaagaagtttactttcccaaattgggggtaaagatttagtatatgtgaccgacactatg

SEQ ID NO: 34657 - DNA, 343 bp, Glycine max
  unsure at all n locations
agcttgtagccatcagaagagaatgagcatgtgattagaagtatgactganaatgttagttagtttgtcagattgattgtgaaggaatgcattaaccgtatcccggtgagagtgtgatccttanattntgagaganacgactatcatttagtactgattnttgcgtgaatctttcaagtatggactagatgcatganattgaggatgatgaaggccatgtttgattgtgatagccacttagccaaaaagctgaccatgtgcttgaatgaattatcccttgtacccaggttgagttgaatgaattattgatttgatgaaccctgagcctatatagtgttatctc

SEQ ID NO: 34658 - DNA, 408 bp, Glycine max
tcttagtttcagatgatgcacatgagtttgtagctacctcatgcactcctctaatgactatagcatcatttttggcgctaaactgttgggagttggaagccatcttctcaattaaattcctggcttcagcaggggtcatgtctccaagggctccaccactggcagcatctatcatacttctctccatgttattgagtccttcataaaaatattggagaagaagctgctcacaaatctggtggtgaaggcaactggtgcataattttttaaatctctcccaatattcatataggctttctccactgagttgcctaatgcctaaaatatcctttctgatggccgtggtcctagaagcacggaaaagtttttctaagaatactctcttgaggcatcccagctcgtgatgga

SEQ ID NO: 34659 - DNA, 441 bp, Glycine max
  unsure at all n locations
agcttcaacatcagaccacttccagggtgctggaactacttcacatggacttgatggggcctatgcaagttgaaagccttggaggaaagaggtatgcctatgttgttgtggatgatttctccagatttacctgngtcaactttatcagagagaaatcagacacctttgaagtattcaaagagttgagtctaagacttcaaagagaaaaagactgtgtcatcaagagaattaggagtgaccatggcagagagtttgaaaacagcaagtttactgaattctgcacatctgaaggcatcactcatgagttctctgcagccattacaccacaacaaaatggcatagttganaggaaaaataggactttgcangaagctgctanggtcatgcttcatgccanagaacttccctataatctctgggctgaagccatgaacacagcat

SEQ ID NO: 34660 - DNA, 430 bp, Glycine max
tgtaatcgattacacatatactgtaatcgattaccagagcagattttcagaaaatattctcaacagtcacatcttttatgtggttcttgaatggctatcaaaggcctatatatatgtgacttaagacacgaatttgctaagagtttttcagaacaaaaaggtcttatcctcttaaaaagcaaatcgttttatcctcttacaaattccttggccaaattacttgtgattcaataaggaattatttgagtactcaaattgttcaatctatctctttcaagagagatttcttcttctcttcttcttcattctgaaaagggattaagagaccgagggtctcttgttgtgaaagaattctaaacacaaaggaagggttgtccttgtgtgtttagaacttgtaaaaggaatttacaagatagtggaactctcaagc

SEQ ID NO: 34661 - DNA, 421 bp, Glycine max
  unsure at all n locations
agcttgtggtgtgtgatggttccttcaaggagattttctgctttgatagtcttaatgtggatgaggctggactcctgttacagctcanagtcttatgcttggactcccttccagagcttgtttccattgggttagagaactcttggattcagcccttactgggaaatctagaaaccttggaagtaataggttgttctagtttaaaagacttgttcacatcctcaacagcaagaagtttgactcgactcanaagaatggagataaaaaggtgtgattcaattgaagagatagtctctaaggagggggatgaatcacatgagaatgaaataatatttccgcaactcaattgtttgaaacttgaatatttacgaaagctgagaagcttctataaaggaagtttattaagtttcccatcattgga

SEQ ID NO: 34662 - DNA, 377 bp, Glycine max
atactcaagctgctgagctctgataattctttaagtttcaaacaattgagatgctgaaatattatctcattctcgtgattcatccccttccttagacactatctcttcaatttaatcacaccaacttatctcaattgttttgagttgacccaaacttttgggtgttgaggatgtgaacaaatatagcagtgttgcaattttttacttccaaaaatgtcaaattcgagaagggcactgtgcatggttccaaattaggcaacactccgcttttatgaaaattcgcagcattattcttcgaataatacaccacaacctattcataaatgctctcattctatttcatccccttggttaaagatgatggaacacaagactta

SEQ ID NO: 34663 - DNA, 325 bp, Glycine max
  unsure at all n locations
agcttggactcatgagtggtaagttgaggtctaagtggattggtccttttgttgttactaatgtttttccttatggtacagttgagatcaaaagtgactccacaaacaagagtttcaaggtcaatggacaccaacttaagccattcctcacaaacccttctttagtggacgtagtggtggaagagacttccttactccaccctactattcctccaccatgacttanggagtttttctttgcctatctccttctttacttttattacantttgccgattctatttgatnggttaattgcttttaatcttttaattacgctacattg

SEQ ID NO: 34664 - DNA, 405 bp, Glycine max
tgtaggccttggatcttcttcatcaatggagtcctttgcttcttgaagatcaatggcagcagaatggagaaggaggaaagctgattggagacgccacttcaaggagaagatgagtcaagaacaagctcacaaccataggaagccatggataagagctttaaggtagaagatgagtggagggagaaggagagaaggaacacaaaattttatgtcccaaatgaggtcagaactttgaagtgtaattcccaaatgatcaaagttgaaaaactacacacataagacctctatttatagcttaagtgtcacacaaaattggagggaaatttgaattctattcaaatttcacttgaatttgaatttgaatttgtggagccaaatttggagccaaaatttcactaattatga

SEQ ID NO: 34665 - DNA, 423 bp, Glycine max
  unsure at all n locations
agcttaattctattctctntnttttttttaattntgacatctacgaaattgtgatgtcaaaatatttgtaaatggaaaatcacttatcacaaatgtatgaggactaaaaatatatacaattccatgtaatattttaaaaaatattaatataaatattgtacgtatacagctcaatgactcgactaatacaacctgaatttatttgaattaacaacaaatttatttgactcaactaatacaacctcaatttcaaaagaccaatctaaactcactccgcagcaaaacaaataacatgattcccacgcatatgtgatagcgcttgtgttctcaccaatccaccaaatgtgctcccaccacgtcacttcctggcatgtaatagaaatcatgaaaatgtttaanatcattccgtgtaaaataataaaa

SEQ ID NO: 34666 - DNA, 395 bp, Glycine max
  unsure at all n locations
tattattgtttggagtttaaaacctgaaactcatgagaggtagtaagagaagaggaagcatgcgatgatcatgatgatgggccttaccgtgggccttggactcatcgtgggccccaccaacggagtacctcgcgtaacacttcccgagaaacatgtcaccgtaatccgctgtgccgcaatcgctcttcaggcgcgagatcgcctccgccacgcagtcctggcactccccgtagctcaagtcgccggtgcactgcgccacgccgtgtaccccaccggacccaccgacgcgaaagttcccaccggcggcggcgagtccggcgagcacggcgtcgcggctccccatggcgtcggngttgtacccgaccgacggcccgcacttcttcagcaccaccgtc

SEQ ID NO: 34667 - DNA, 426 bp, Glycine max
  unsure at all n locations
ttctntgacttttaataaattntctttagtagatcttagttatttttttaaacggtggcttcagttttttatacatttttttctttttatccttaaacatttatcaaattttctgattattttaaaaataaattatgattctttctgttattttatattttttaataatttccacaactaataatttaataaaaaattacattttcaatttccagcttaactttctcacttctagctaattttataaaaaaaataacaagaatgaaactgaggacaatgaaaaagtcccgtgtaaccaatcaatttgaataattaattaaagaattgaattaatagaaaattgaagaatttaaataactgtattcatttacaagctacaacagtaaaaaagaatgaacaccatttttgcgaatgactcacttttct

SEQ ID NO: 34668 - DNA, 404 bp, Glycine max
  unsure at all n locations
gggacagaatctcccatgctactatgaatatctccaccttattaagcaacacctgccacttgagcaaaattggtcctagtgtaaaacacctaacattagaactttgggtctaccaatatttattattaattttttaaagtaaaaaatatcacacatgttaattaaaagaccttacatattattattctctttaaagtaaaaaaatatattttaatttttattctacgtgtcattttctattgcaccgacacttcacctgagagtacagatttcactacgagaatagctccaagtatttgcattgtagcatcactaacaacatcgtgtccatttggtgcagcacacaagtattcacaactattcttcatgtccggaattagtgatctgatcaanatactaatcaa

SEQ ID NO: 34669 - DNA, 273 bp, Glycine max
agctctatctttaatcaaccacacatggcccgagccataatcgacgacaaaaaatgaatcacaagccaatgaagccacccttctggacacacacgcctgattcatgagcatatcacacattcacacgattcaacgaagagtgagagtgtgagtcagaggttctacctatcttattaccattgataagagagccttgctccacttatacattgattgtctgcctacaaatacactctccatgctctgaatggatgcacatgtttaataatctta

SEQ ID NO: 34670 - DNA, 483 bp, Glycine max
  unsure at all n locations
tcctttgaccccttagaancgctatagattccgtgacactatagaatgctctagctcgtacgcgcggtatcttcgacacaaaggattactccgtttcctgcagataaaagggctctgagcatgtcgacctatgaaagtctattaactaaacgtccgtgtggaaaagaatgagcggcaaccatttctcgagagcttccgacgattagattgcaaccttttcgtctaataagacgctcgagcctaagatgccaattgaaccctttttacaacttgaacttctcctaacttctgatgtttattttctaaaccctcaacatattatacgcccgccatctatacccggattgtgcctttagtgcgacacactaattgctgtgaaattgaagtccaatggcgtcattcttgactcctacattgggccatgagaccactctctgacttgacttcccttattattatagggattttataatggtcagcccg

SEQ ID NO: 34671 - DNA, 407 bp, Glycine max
  unsure at all n locations
agcttgtgcaaatcaaatcactcctacatttcatctctagcatgcatcttctttctttacccactcctcacgtttggttttttagggaaaaacaccataactaaacgcgccgcaagggatccctatcgcaccagatccaaatctagaacgatgggtgatcaagaggagacgcaggaacagatgaaagccgacatgtcggctctgaaagaacaaatggcctccatgatggaggccatgttaagtatgaagcagctcatagagaagaacgcggccaccgccgccgctgccagttcggctgccgaagcagacccgactctcttggcaactacgcaccatcctccctcanacataataggacggngaagggacacactggggcacgatggcagccctcacctgggatacaa

SEQ ID NO: 34672 - DNA, 416 bp, Glycine max
tcagcttgagggtagtgttgaaaatcagaattaatattctgattctattaataattgtaatttatagggacattatatttgatttagaggaaacaaaatatcctctatttatgtaccactaatgtaattatcctatataaacaagcatttgttgtgtactctgatacacggttttcactctagtatccctctttattttctctcattttacagatatgatttgatcacgataaatagggaaatttctcagctgataattaaggattatacacattattagtggttatgattccttatattgtactcttgattcattataaatcagaataacatgtgcaacacaactacataattacagtaaataacattgttatattgagtaatattctgagtgctgaccacaactacataagtgc

SEQ ID NO: 34673 - DNA, 149 bp, Glycine max
agcttccatcatagtggaatcagagcacaagaacttcaagtaggtgcttcttaaaccctcattaaatttttttctttaacctctcttccattggtggttcctcatttttcttcatggatctcctcacatggcctggtctaaatggtggt

SEQ ID NO: 34674 - DNA, 362 bp, Glycine max
tgaatcggacctcagtgtgaaaagttatgaccatttgaatttctcgagagctttcgttgttcaatgtcgagcatctcgacatattatgcgctcgaatcagacatccgtgtgaaaagttatgaccatttgaatttctcgagagcttccgatgtttaatttcgagcctctcgacatattatgcgcccgaatcggacatccgtgtgaaaagttatgaacatttgaatttctcgagagcttccgatgttgaatttcgagcctctcgacatattatgcgcccgaatcggacatccgtgtgaaaagttatgaccatttgaatttctcgagagcttccgatgtttaatttcgagcgactcgatatatta

SEQ ID NO: 34675 - DNA, 418 bp, Glycine max
  unsure at all n locations
agcttgtggttatgaaatttacgatcctcccactcttcggtcctcttcttcagctcgatccaaggacaaggtttttctcttcttttttaaattttgttctctctttgtttcttgcttctcaaaagaatatttaaaaaggagacttgctattttgtttctttgttttaagtttcacattatggtgataatttttttatcttctgaaaccttcattcaggttgtggttttgagggtgtcattgcactgcaaggcctgcgaagganaagttagaaagcatatttcaaaaatggaaggtgagtctgcttaatcaatacatagtcttggagtctcaaaatgagagtctggatataattagataaacattggcagtaataatactaattctcatgttcttgagcattntttntaatctttntct

SEQ ID NO: 34676 - DNA, 443 bp, Glycine max
  unsure at all n locations
acactactagaaactctagcgtactctggcactcaagacttgtatagatctctctctctctcttcaccttatattggtttttttacagaaaatatgaaagaataatgctctgtggttaatctctacaattttctacaaaactactatttgtctttatttacaagttgtaagatttaactttgtactgctctcagttagctccgccactccttgtaccaaagttaattggtttttaatagtataatttagtattttttggctgcgaaaaaaaatttgtacgatttctgcattcctattgacataatccgatttggttaaacttattgattgaaataaatatttattggaatcaaataggtagtgcatgcatttgtatgtgagttggacagatcatgcccaaancaatcnatattggttttattntatcttctggtatcaaaatc

SEQ ID NO: 34677 - DNA, 394 bp, Glycine max
  unsure at all n locations
agctgtgtaagatgttttaaggagttaatcctcagccaaacctgtgcaacctcatttaaagaattcttttatcatcctatggactaagttcattcttcttgaatntcttgattcttgacttggatcaaacttgaatagcgttcatctttggcatcatcaaaacttcatataacatatgcttctacaattaaaggtagtgtcttggtggggtaacatctctaagcaatctccacatgaaatgcttaacttttggagggatgtgaagcttcccaagaagattccaattacctgagattttgaattggtcacgagccaaacattgcttcgtaagatgatatngttgtcttacagagtaatttgcatgtttgctgattntctaagtaagtacgtcatc

SEQ ID NO: 34678 - DNA, 438 bp, Glycine max
  unsure at all n locations
ntgngactattcacacaatttaacaagaaacaatgaaggatcaactgtgaaaattaattgcattcccatacctagatctccttctaaattccaccgaatttatatatgtttaaatgcatggaagcaaggattcaagactagctgtggatcttttattggtcttgatggttgttttttgaaaggctactatggtgatcatttgcttgcagcagcgggacaagatgcaaacaatgcattttttgtgattgcttatgcggtagtaaatgttgaagataaagataactggaagtggttcctcacattgttacatgaagaccttggagactgcaagcaatatggctgaaattttatgttagacatccaaaaagtgcaattcaattgttttgctttgatcaattcatatatagaatgttgtaattntgattgcctgcatgcata

SEQ ID NO: 34679 - DNA, 423 bp, Glycine max
  unsure at all n locations
agctctanaatttgaattataacgttcaaaaactgctggtaatcgattaccatatatgtgtaatcgattacacagtgcanattttgaattcaaattttaatagctgttgtaaatcagttttggccattggtaatcgattacatcctctggtaatcgattaccagagagtaaatctcttgaaaaagactttntttaacttanatttcttggccaaaccttttgctacttcaattggaattcccttcctatttaatgtaatcttcctaagactctagatactggcttgatcatccatcttgaatatctttgatttctttgtcttgaataanactttgagaaacatgtaatcctttggcatcatcanaacattaagcttgtcaccaacaaaagtctgaagacccatcgaacttgtcaaaagctttc

SEQ ID NO: 34680 - DNA, 431 bp, Glycine max
  unsure at all n locations
tcggaagaaagtgatgaagtacaagccctanaggcagagcttgaaagagcctgngtagtcgaagagaagttcaagtccatagccatcaaagtctgaaaaaagtatgatgaactaagggatgtcaatatggccaccgatgaagccttggaatgagaaaccaagaaggcccgaaaggaagaacacgaccaaagcaaagttttgaggggctttatagggcagcaatagtgagctcaagctccgaagaggtgaaaggaatcatcacgggtcaaaggcatgatcttgaaggacgagctaaaggtttgccttatgtcgaaaagaaatttgttccaacagttaagcgagactgaagggaatatgtgggccatcatcgataagtgcaaagagaagctaaatctagcggcgactcacgagcaaaggctagaggatgagta

SEQ ID NO: 34681 - DNA, 468 bp, Glycine max
cactcgacccgggatccttaagcacctgcagctgcagcttgctctatagtgcctggacgtttgtatgttggaagctgtaatcagcgagggatggaaaataaaagtgtaaataaattctaagtatgacaatagattaccttataatgccaacaattttgtctcaagtgactcaaatcactaaatggacatagttagtggacatccaaaagtccatacttattactaagaaacaaattgttatgatactttttttactatcggattatgaaaatttcaagattctaaagttcaatatgtcatataactcacaactaacataaggatgtcttccgtcttccctattactatattagtagtaccttatgatgattgtagcaaggtgaagctgatggaagtcgatctacatctttgccttcaattggttgccaaagaggaacatcacatgcaacctgtgtaacaaatagacat

SEQ ID NO: 34682 - DNA, 433 bp, Glycine max
  unsure at all n locations
tgcgcctactaggattggtctagtatagtggtggaagaatttggatggttagcacaattttttaagttcaaattaatcttgttgctgttattatatactaaaataattattctaaccatgcttgcattggttcaaaactcaaaggcattgtttgcgttaaagaaaaaaaaatacattgctttgtggtataatataatcaactatatattgctgccatgtttgaatcagccttgatttcaattaatctttcggctgacaaagcaaaacgcttatactgcatgccaaatattttaatttgctgtttatgccaatgtacttaattgcgtattgtgataatagnttgttttcctgtgtcaatatttaatcagtatcattctaaaaagttataaaaaaatcgattaatataacgaataaggagaaattacttaattat

SEQ ID NO: 34683 - DNA, 428 bp, Glycine max
  unsure at all n locations
ttgcttagtgtacttattggtgagagaagcttggctgttggatagatgagcgattgcgtcctccagtctatccgtcgtagtctttttggttgcatggtcaaccatggcgatggtgacggcagcatgttggactagtgttagcaacgaggaagagaagatgattgccttagttcaaggcaaggcacctcctgcgaatgggttgatcgaaacaagtattttgcatgcttttattcatgttcatgcagtatcttatatactgcgagttattacattcataacaacccttaaccgatttaactaactctagcagagtaactaacttctaatagcctcaactaactacacgtgctattanttaactacctacaggtgctctttggctacatcgtgcgtgcactattagaaaatatattntntacattggttat

SEQ ID NO: 34684 - DNA, 380 bp, Glycine max
cgattggggatagctcttgatgaccagccttgcagcaattcagattgtctatatcttcatgagattggctctcaagaggatagtttcacaaaatatgaaataatttcagcatacactatgtatttttctaatcttaaatgagctttcatgcaaagcctgttatgattctgttgaaagatagaaactgttgaatgtttcttgtcctggctgcatgctagtcctggatgcaaagctgaggctaaaatattactttcatgcaattggcaaactttttttttcctatagttagttaaaggctgcatgtattttttaaattgattcacatgggttttgttggcagttgatacatgattggaccattcattttccctctattctat

SEQ ID NO: 34685 - DNA, 410 bp, Glycine max
  unsure at all n locations
agcttccatcacccgtggtagtcctcatttgtttcgtgtacttttattctcgtttcatttactttccgtacccccttttgacgtgcttcaatcatttacttaagtcattttctcgcctaatcaaaaaataaaataaatttctaccgatcatttaatttgtaatatccgttaatttttgttaaaatgaaatccgatcgttcggtcacgccgtaaccacgttggaaaccaaaaagaggtaaaataataatataataatcaaaaaatattntttagtaaaataaagcaaaaaaaatcaattggacttttctctttgagatttctctttcttaattgaattgactaataactaaagtgaaactaaggctaanatcaactcgcaaagtcaagctcgtccgcaaaaagtactaaaa

SEQ ID NO: 34686 - DNA, 420 bp, Glycine max
ctgagaactagaagatatagaaagagtacttctttacatgataatggtttattaaagaagattagaacagaataatgcagcgttttagaattctaacttaaaaaagaggtgagattttttagatcgatccttaaaagccagcgaatacatcagtgttacattcgttactgacttactgatcataaattagaaagctattagattaaaatatatttttgttcatataaattttaaaatatttgagattcttcatataaaaatttcgaggtattttttttcctctaccaaattctaaactgttactttggtccttggtccggggttagatttccaacatatgtgcttgatggttgtgaacctaagccaatccattagtcaattgggtgttgacaagagctcaaagactctcaccctacaaaa

SEQ ID NO: 34687 - DNA, 307 bp, Glycine max
  unsure at all n locations
tgcttgctaacccatggaagctcctaatatctcccacactctatggtgtgggccattcttggatggccttgattntctcaaggtccacttggaccccatttctaccaactacaaaacctaagaaaactatattatctacacaaaaggtacacttctctatatttgcatagagggtgtacttcctaaagactgaaagaacttgcctgagatgtcctaagtgatcatctaagctcctactgtacactagaatatcatcaaaataaacaactacaaatctacctatgaaatcccttaagacatgatgcat

SEQ ID NO: 34688 - DNA, 249 bp, Glycine max
tgcttgtggagcttctatggaggctggatttttgagcttcaatgaggtccttcaatggtgattttccaccatggagatgtagcggaagacaaaggagaaaaggtgagaggaggtgccatccactagggaataagccatggaagaaagagcttcgccatcaagagagtgccttggataacaagcttggagagggtgcttcaatgaaggaaaagaaagagagagagagaaagatagagggggggggggggg

SEQ ID NO: 34689 - DNA, 310 bp, Glycine max
  unsure at all n locations
agcttataataatggtgaatgacaatgtaaactcctagggggggggggggnaanccaacacccaacccacctttgattacacaatttaatagcagtcaaaatcatctttggccttcgatcatcaattacttactctgtgattccattaccagagagcttatctctagaaaaagacttttattaactaaaatatattgttcatacctttagctactccaattggacttcccttactatataatgtaatcttgctaagactctatatactgcacttatcatgcctcctgaatatctataatttctttgtctt

SEQ ID NO: 34690 - DNA, 420 bp, Glycine max
  unsure at all n locations
ntgaagaaacaagatacaaatcatctatgtgaatccttctttcttgtaaagctttctataaattcttataaagatacaaagttctcaaaacaccttgcataccttgagagaaaagactaaaagtgctaagtgatatatatccatttgttaaaagatcatactctagttagtgagcaatcttccaacaaatcttgttggtttgtttagagtcaacaaggacttggtgggataaagaatattgggtttaagtcaagcctaggataaagcttgcaagtgtatgtaagagctagaagtaacaatgaacaatacttgtaactttgataagttagtaaaaacttggtggttgctaagaattggatgcaatcttgaggttgagacaaactaatataaatcatttgtgtgctatcttacttaattgac

SEQ ID NO: 34691 - DNA, 407 bp, Glycine max
  unsure at all n locations
agcttctatataagctgaacctttntatcaataaacacaagttgagttttattcagaaaattagagtttatctcttttatcttagtgagagtgattctcctaaattcttgagtgattcaagaacaccctggctgtatcaaaggactttcacaacctttgtgtgttgcccttgcaggaaagagtgattgtttccttcctttcatcttcacccttgttatttgaaaccacaattccagaaaatccacctctgcccagaattatctcgtggccataactcctgttttacgcactcaaattaagtgattcttgagcctaaattgaatttcaaaacaagacctttttcacctcgtttagaatcacctcatttggagccctgtagcttcagttattgccatttctatatttct

SEQ ID NO: 34692 - DNA, 434 bp, Glycine max
  unsure at all n locations
ntacaacagattntagtaatgacccactaacctagaattaaaataacttaatgccattaaccttgggaattaaaaaaaaaacttaatggctgagtgtaactaaaattgtggcaaccaaaagtcacccccaacagccaacaagtcagccaccatttggtctcccaaaaggctgatgcctaggttgccaattgggcccttattacaacttgaactaaacctactaaaaagcccttttagttgattaacccaaaacatatttttggtcagccaactttacaaggattgggccattatttagacaaactaaacactctaaaattgagacaaagtggtgtcatttagtccttctccatttgggccatgatacaactcacaaccttggacttttctccttgaaacttgggcttgtattcaaatagtatggacaacacttg

SEQ ID NO: 34693 - DNA, 421 bp, Glycine max
  unsure at all n locations
agcttagctgtagcatttagtaaaaaaaaaaaaagttggggacagtgtgtttcttttatctgtcaactttctcccgttttctcaattaaaatgggtttaatgatgacccacgttatggaaacaaattattgttctcacataaattttgtatccattcgcttaatcaacaacatcatcgctaaagagcttanattggtgggcatcaagaaccaatttccttatagaagagaatgcgcccattattccaacacccgtgaagaccaccataattgaggtgttaatccaataagtgaaggatgattttggaggcttgtatgtcatgttgtacataagcataggcagaacgaaatccanagggatgaaaccaatggcaccaaccacaccgttgatgtctccaaaaaatggcagcatagctgccaca

SEQ ID NO: 34694 - DNA, 383 bp, Glycine max
tatattacatactatcatgtcaatgttaaacaaggcatttactgttgctttgaaagagcagatcaccatatttaaagttgtatcaattggtatttagaaaaattactgataaaagagttaccaaagttgcaacaccatgaccagccagtgctccagctatgactccaaggggagaagaagctgctgcaatggctgaatagtatggaaaaaacagttcatgataaaggtggtgagttcagtgcatgacaagaagcaagatagcatgtcttggtatttgaaacaaatgaaaagtcaacaagaaaattatataaactgaaactgtattgatccaaatcaattggcactcaactcttttaacgccaagcatataaattagcttcaag

SEQ ID NO: 34695 - DNA, 417 bp, Glycine max
  unsure at all n locations
agcttacaacattggccaattaagaatcccatataagacagatctggcaacaacgtagtggggttgggtttggagggctccacttgtattaaatttcgtcttgatcttttccatccatacttcatgactctttcatccacatgtttgaatgctcatgacaaattaagattggtggataaccaacaaaacacccttgttattatcaccaattcatcatcaccatcgttcacacaaaacttgtgtttagtgagatcaatttgtagcacagctcattggccccctattagcttaaattttgtatagaaacaaagaaataattntcaaacaataaaacaacttttgtcttctttcattttttaagaatattntcaaatgtgccaaatagttttttttaaaaggataagatgagtaaaaagt

SEQ ID NO: 34696 - DNA, 419 bp, Glycine max
  unsure at all n locations
tgtagaatggctagacatgatacatgtcagggcttggtttggttcaaggataaaagggatgccccacattatttccatgacacaaatgcaaaaatgacgatttggaaattttatgcaaaattggttatgcatagcanntatgcggacactcaagtgtcaaatttttatggtcatgtgatgctagggctcaggattcatttcctctattttagtcaacccaacgtttccaaaatatgttcttttatcaatttgtgcattcatccgagtccattttgggcgtctgggaaaatcttcacagcattcacccttcaggtgtatacacattnnnnccgcggctagttgtgagcagtgaaggggtgnnagaaaagttggaagtcatctcttttcaaaagcatgttggcttttcagcttgacaactt

SEQ ID NO: 34697 - DNA, 437 bp, Glycine max
agcttcctttctcccttcttctgaccctccattatcacaaccaatgtcactcaccatatgaagcttccatggttatcttccatggttgtcactcaccatacgaagtttccatggctgcctaccacccacactactctcggaaccctccactaccccccacaacaatcaccacaccatctggaattttcgtccgacaccaaggaccgcctcgaggccgtcctggctaaacttgatgttgctacacgccaccaggacacccgactggacgctcttctcctatgactacctcggcaacccgaccacctctaccctcctcagtctccatgcttcgtgcccataccaccaagtctcgcaccattactgcctctgccgcggacttcgccactgactccaccgctgtctccgccgttcgagctgactccatcacccatgcttat

SEQ ID NO: 34698 - DNA, 409 bp, Glycine max
  unsure at all n locations
tattctgagcatgattcctcctaatttccatgcccaaaatctttttagttgctcccatatctttcatctcaaattcactattaaaaagtgacttcagtttccgaatttcaaacttgtgtcaagatactatgggcatgtcgtccacatagagaagtagataaatgtatgcaccatccttcaccttactatgataaacacatgaatcatatggacttttattgtacccatgagagataattaactaatcgaatctcttgtaccattgtcttggagattgcttcaatccataaagagacctttacaacctacaaataaaatcttcctttccttgcacttcaaaaccttttggttgtttcataaaaatttcttcctcccactattccatggagaaaangttgtttcacatcaa

SEQ ID NO: 34699 - DNA, 396 bp, Glycine max
  unsure at all n locations
agctntaaatgtgcttcatcttggtcattggcaagaatcgcgttcatatcacattgaaatgaggagtgaagaattcctaacagagttgagggatcaaaagtatttgaagtagtcttcgagggatatcaagaatatctgagttgccaccctctattgctcaacttgagaacctacaaattcttgatcttggaaacatttcataatgatattttatcaatgaacattctcacacatatgattctatctcaacattacttgttggagagaatcccacacgggattgagaagctcattaatctattcaacccccacccctcttctatattcccagttattacaacactntcaaatgctntangtacttgagacacaatcaccatacccaactcatccata

SEQ ID NO: 34700 - DNA, 415 bp, Glycine max
  unsure at all n locations
tgcgcgaatcacanaactcctacatggcatctctagcatgcattttctttctttacccacccctcacgttgggttttttagggaaaaacaccataactaaacgcgccgcaagggatccctatcgcaccagatccaaatctagaacgatgggtgatcaagaggagacgcacgaacagatgaaagccgacatgtcggctctgaaagaacaaatggcctccatgatggaggccatgttaagtatgaagcagctcatacagaagaacgcggccaccgccgccgctgtcagttcggctgtcgaagcagactcgactctcttggcaactacgcaccatcctccctcaaacatagtaggacggggaagggacacactggggcacgatggcagccctcacctgtgatacaaccgagcggctta

SEQ ID NO: 34701 - DNA, 437 bp, Glycine max
  unsure at all n locations
agctnttactgtccttgtgttaaatgtttgaatgagagagaactagaagttgagaatatatgagcccatcttttttgtgatggtttttgcaagagttatacaacatgaacatggcatcgtgaatattttgacaaggaaagtgtgtcccaaacaaaggaagttgatgtagatatggatgatcatctagagaatatgattcgtgatattggatcaaagtcttttcagcaagcacatgtgtatgatactttgaaaagtgatgtggaaatccctttgtatctagggtgcactagtttcacaaggttatcaacaatgttgaaattggttaatcttaagacgaanaatgagtggattaataaaagcttcactgaattacttaagttactggaaaaatgcttctgaaaaataacacattgccaagctatcactgtgaggaaaaa

SEQ ID NO: 34702 - DNA, 439 bp, Glycine max
  unsure at all n locations
tgtcccaaggattcatatcctttaaccccaacatagataggcttgtggatggagtttttgaatgcagtttgataccataaggaatcataacctccaattaaacttagaaaaatgatttttcaaagtacatgccgagaagttcttaggttttatgttgacaaagaggggaattgagggtaacccaaataaatgcaaggccatcatgaaaatgagaattccaagaacggtcaaagaagtgaacaactcatagggaagatcatgtccctgtcttggttcttatcaaaatcgacagagaaggaactccctctgcttaagtgatttcggaagaacaagcacttccaatgggtgctagattgtgagaatgccttcaaacaattcaaggaattcctcacaacactacccattntaacaaggccgaaatcgaaaggctctatacttg

SEQ ID NO: 34703 - DNA, 442 bp, Glycine max
  unsure at all n locations
agcttatagtcattacttgttaagaaccataagccagagtcgattgttcctttgataaagtgaagaatttgttttgcagccttgaaatgagtagtggttagagtctcgatgtattggctgatgagtactccagtagcatatataatgtttggtcttgtgtgtcaaatatcataaactacccaccaaactcttgaaatctatagcatccagttttcttgcttcgtcgaactttgataacttcattntgcactccatcagtgttccaattggcttgcatctatccatcttgaatntattaagcatcttctttgcgtagctttgcagtgaaatgaagatttcatcttctttctgctntacctcaatggcaagatagtatgacatttttccgatatcggtcatctcanacttcttcatcatttctttcttanactctgataattgt

SEQ ID NO: 34704 - DNA, 397 bp, Glycine max
  unsure at all n locations
tgtaagagcttggtcacttcctttntcaccacatctagaatgacggngttgagtcgtcgctgtggctacctcactggcttagctgcatcctctaaaagtatcctatgcatgcaggtagatgggctaataccaggaatgtctgctaaagtccatccaatggccttcttgtgcttcttgagcaccggcaacaacttctcctcttgctcaacatcaagggaagcagagatgatcactggaaatttgatgcaatcctaccccgcaagggcattggatagaagactccaagtagattgggccagagatccaagggaaggccctagggttctcatgagccttaaggtagattntgagcccatgggctaagtatgagcccgcttatctttgtaattattagaat

SEQ ID NO: 34705 - DNA, 409 bp, Glycine max
  unsure at all n locations
agctnttctttatagngtatgtttcttgttttatttattggtattggatatgagtttattgttgcatatggaactgatcttctgctgttatcagattaagtctaaggatagataataaggcatcttctcaagaaataacaaaataaatttctacaaactaagattgagtcatttaacaaggcttgtcaatctccacgtgtaacatagaaaacactccaaacagtccttgagcagaacaccacatactagccaagaaagtaatcctgtcccaaatgttgtgttgagatcacaaaatgcctttgaaaattctagcattcctttgtagctatagacactagagagccaccanaacaagcactgccacagaagtttagcttctttacaaaaagccagatcctctanattgact

SEQ ID NO: 34706 - DNA, 413 bp, Glycine max
  unsure at all n locations
tgttcgcacatcgttcgcgtgtatgatatacactcgacatggtttgaagtagaagagaccttcaatcctattacgcaacgtgacggacaaaagtggacagttaacttgaatgatcattattgncaatgcagaaagtattttgcgcttcactatccatgttcacacattattgcagcttgtggttacatgagcatgaactactaccaatatatagatgttgtttacacaaatgagcttaaaagtttactccgcacaatggtggcctcttgggaatgaagcgactattcctccttctaatgacgcatggacacttatccctgacccaactacaattcgtgcgaaaggtcggccaaagtcaacaaggataaggaatgagatggattgggtcaaaccatctaagcaccgacaaaaat

SEQ ID NO: 34707 - DNA, 308 bp, Glycine max
ttgcagcctcgaaatgattagaggctagagtctctatgtataggctgatgagtactccagcaccatatataatgattggtcctgtcgtgtcaaatatcataaactacccaccatactcttgaaatctatagcatacagctttcttgcttcgtcgaactttgataacttcattttgcactccatcagtgatgcaattggcttgcatctatccatcttgaatttattaagcatcttctttgcgtagctttgcagggaaatgaagaattcatcttctttctgctttacctcaatggcaagatagtatgaca

SEQ ID NO: 34708 - DNA, 495 bp, Glycine max
  unsure at all n locations
attgacactatagaattctgtgacactctagaaaaactacgcntgctcgagcttggtcactacgcttgctgcaccacatgaacgagttgtacggattgttgacaccgncttcacgctgacagctgngctggagcacgtgactatcactaccctcatcctatgcatgcaggtagatgggctaataccacgaatgtctgctaaagtccatccaatggccttcttgagcttccttgacaccggcaacaacttctcctcttgctcaacatcaatggaagcagagatgatcacttggaaattgatgcaatcctaccccgcaagggcattggatagaagaactccagtaaattgggccacagatccaagggaaggccctagnggtctcatgagccttaaagtagaatttgagcccatgggcttaagattgagcccgcctatactttgaattattacaataagtttttcctttcggtagagcctggattttggccattctcn

SEQ ID NO: 34709 - DNA, 427 bp, Glycine max
  unsure at all n locations
agcttggataactacaaatttaatgcatagaaaaaagttcaaaagtcaatgccactatgataggtataaaaaaatcaaatatatcatgttattttttaaaattggttacattattaaaaatatatttttcctattaaataattttttatattttttttactctggttgaaaaaggaattaaataataaatcaatttaaagaaaaaaaatcttcaaaaatgaaataaaactcctttttaatcaatgtaaaagaatacaaaaataatatgaagaaattaattgaaaaataactttctttgttccttttcttgtgtaatttaacattntatgtcttttcctatgtacaagagactataaacgtaagttatgtgaaagaaacattntcatataatcattacggatttgaatcctctcatgtgaaattcttg

SEQ ID NO: 34710 - DNA, 356 bp, Glycine max
tctctgtctaagtttctctctctcactattggctatgatagccctgaatttcttttattgcaggaaacgttccgtgtcacgagtttcttttatcacgtcacactcacgtttgccctcttctgggaagaatcattgatagccctgaatttctgctctcataacgctatattggcattgcgtattaccttgtacatgccagctttcatattcatcattgaatacgcagggataatctctatgatcctcgagtaagagtattataacatggcaaggatacttctgagcacagaaatagctcacacagtttgttatcttgatggcgatgttctccctcatttctgtctgtattaacctta

SEQ ID NO: 34711 - DNA, 384 bp, Glycine max
  unsure at all n locations
agcttgttatagtatcttaccacactcttgacatactctntacttctgattcttgtaataattgagttaatgaaatgatgctaatgtgtctcagtcccactttatgtatgcattntctattctaatgcaaattttgtcttccaagtctttccaacatttaaaaaattaggaatcaatatttactcagatttttaaatttaacattccattnttcatatattgatcctacttgagagagcattgtttgtgacagtttggctttttttttaatctttttctgatctntgtatactgcagncaattgcaactttctttgatcanattatggctaagattggnggaaacacttgctgcccaggtacataatatacttcaacgaatcat

SEQ ID NO: 34712 - DNA, 279 bp, Glycine max
tcgcttaagcgaatagagctctccattggaacacatgtaacccttcgccataaaggcctatatctaccgaaactcttaactagatgtaagctctatcctccctgctgctatctttgaattcttattgtctcgcttttgtatcaaacctttgtcatgtgcaagagctcttatatgaccttttacatcttgaaagaaaacactacatgcggggacagaagctccgtcgctaagacaatttagagaccggccgtgagcctaccatactacataacttcctat

SEQ ID NO: 34713 - DNA, 426 bp, Glycine max
  unsure at all n locations
agcttgtctggacaaagacaaggacagccagtatttatcaccaaacttgaagtatgttcttaaatgcatgataaaataattntatcatgagattgatttatttatttctgtttttaatttgaccagtctattttaatatccctgtatggcctttntggtcttgtttttaacaatagaaattgacgtaattttgtagcaactgttgagctctttgttgtatgatcctgatgcataatttctttgtaacagggttacaggaattcttccgcctctgagacgtaagttcaagaagttttaatctcttctcacaagtttagaanatattgagtggttgaagtttacaatattgttctaaaattattggtgttatttgctggtgagttgattatttggtttgaatcaagtattangtattaagtcatagat

SEQ ID NO: 34714 - DNA, 389 bp, Glycine max
gctgacatcgccgctgtgcgactgtgttggctcatcgataactgatactacgctgcgtaagaaagagagccctatgccatccttggtacctgaccatgcatacgatcctctacgtgctacctatgacggctccctatatgacagcacttgggagtgcgctctgacgcttgattaccactactatctctcaaggagttgcaggcctcttgactatcataactgggctacggcaggatcgatgcagctccgactgatgctttactcaagaatgacaccgatctatcatcatgcgtcaaggaggctactgatgacagcttcacgagtatgactgtagagcaacgatggtggacttcaacctcaatgactttgatggcgaccttattaactct

SEQ ID NO: 34715 - DNA, 229 bp, Glycine max
tagagcggtgaacatccacacacaatgcatcaatagcaacaaagacaaccagcacggctagatgaaatcagtgatacgccaccttctgatctgaacgaccccaaactgatattacgccatccatatacggaaccagaacacttataccaccacagcatccttggacaacggcagaaaaaatattgcaaccactctcaatcaaagagcccaaccgagctctgacaacatc

SEQ ID NO: 34716 - DNA, 66 bp, Glycine max
tagctaaaaaggaaactcattttacaataaagagcaacattaaagaaactttccctcttagacaac

SEQ ID NO: 34717 - DNA, 387 bp, Glycine max
  unsure at all n locations
agcttcttatccaaggctcatcttggtggtgaagctccttcttccctggcttattccctagtggatggcgcctcctctcacctcttttcctttgtctttcactgcatctccatggtggaaaatcaccattaaaggacctcattgaagctcanagatccaacctccatagaagccccacaatcaagcttccatcagttgtagacccctaagaccaagaaaagacagctttcacatgtccctttggtgtttttgcttattgccgaatgccattcgggttatgtaatgctcctgctacgttccaaagatgtatgatggctatctttgctgacatggtagagaagtgcattgaagtctttatggatgaattttcagtctttggcgcatctt

SEQ ID NO: 34718 - DNA, 438 bp, Glycine max
  unsure at all n locations
tatgcgcatatttccttacgaacgttcactttgcgcaagacatcctattaactaagaaaaatgcacccatatacaatcaaggcagcttcgttacctagattatttacatgtacttccaaggtgtatttgttacttacatcacacacatctccttggctaaatttacatacatgcatactcaaagcattttggggtaccaaaaattgcacatgtgcacatcttggtatttctaatacctatacatacacaaacttcatgatgaatattgactatctacacaataaagtgctacatttcatgctcttttcaagtttttgctacctaaagctgcatgcaaattcaagtatattttcctttgctgactaaaattgtattaaaaggtatatattctttntgtaatgtattttctttacataacatgcaacatatttatatata

SEQ ID NO: 34719 - DNA, 392 bp, Glycine max
  unsure at all n locations
agctntaactcggatgtccgattcangcgcataatatatcgagacacttgatattgaataacagaagctctcgagaaattcgaatggtcataacttttcacacggatgtccgattcgggcgcataatatgtcgagacgctcgaaattgaacaacggaagctctcgagaaattctaatggtcataacttttcactcggatgaccggatcaagcgcataatatatcgagacgctcgaaattgaacaacggaagcttccgagaaattcaaatggtcataaactttaactcagaggcccgattcatgcgcataatatatcgagacgcttcgaattgaacatcggaagctctctagaaattcaaatggtcataaactttcacttggaggtccgattc

SEQ ID NO: 34720 - DNA, 393 bp, Glycine max
  unsure at all n locations
tgtagcaaatgcaaacggcaataacgttntactcggatgttcgattgagtcacgtaatacatcgaaacgctcgaaattgaaaacagaagctctgtgcaaattcaaacgacaatacattttaactcggatgtccgattgagtcccgtaatatatcaagacactcgaaattgagaataaaagctctgaacaaattcaaacgacaataactttttactcggatgtccgattgagtccagtaatatatctagacactcgaaattgagaatagaagagctgagcaaattcaaacgacaataactttttactcggatgtccgatggagtcccgagcgtctcgatatattatgcgcctaaattggacatccgagttaaaagttatgacaattttaattgc

SEQ ID NO: 34721 - DNA, 326 bp, Glycine max
  unsure at all n locations
agcttattgatgtgcttgcttcagttggtgatgctgctacctatcgtgaacacatggatgcgattcttgaaggtctacctagggattttgactcanagattgctctaattgagagtcgtctaccacacatcaccattgaagaagctgaaggttacattcttacgcaagaactatgaattcgaaaaatacactacactcgaatctttgagtaattccttcacaccaacagtgaatcttactcaaatgagttcttcgcattccactgagaatgataactcaaattcgtactttgacaccaatacaatgtataccaatcagtattcctc

SEQ ID NO: 34722 - DNA, 423 bp, Glycine max
  unsure at all n locations
taagctataagacttgcttattcacagttcagtcagtttaagatctcttataattgtctaaaggagaaatagtctcttaatgagctcatttcatactgtgtgcaagaagagcaaaggccgaagcaagaaaggacctgctcatgttgtgagtacctctaaatacaagggcaaaagaaaaagaactgaggagctcaagaatgaagctgctaaaggtttagtacaaaagaaacaaaatcaaggtgacaattgtttcttttgcagtgagcctggacatgtaaagaagaaatgtaccaaatatcatgcttggcatgcaaagaaaggtatgtttcttactttggtctgttctgaggtcaatttagcttcagtacctaanaacacttggtggttagattctggtgtcactactaacatcagtgtttcaat

SEQ ID NO: 34723 - DNA, 428 bp, Glycine max
  unsure at all n locations
agcttatgttgcaaacatttaaaatagacctcctcagcagcaaaaccaacaacaacagaataattatgacctttcaagcaacagatacaatccaggttggaggaatcatccaaatctgagatggacaagtcctccacaacaacaacaacctgtccctccttttccagaatgttgctggtccaagcaagccatatgttcctcctccaatgcagcaacaacagcagcagtcacaacaaagacaacaaggaactgaggctcctcctcaaccttccttagaagagttagtgaggcaaatgaccatccagaatatgcaatttcagcaagagacaagagcctccattcagagtctgacaaatcagatggngcagatggctactcagttgaaccaagctcagtcccaaaattctgacaaattgccttcacaaact

SEQ ID NO: 34724 - DNA, 362 bp, Glycine max
tcttatccaaggcaattcttggtggagaatctccatcttccttggcttattccctagtggatggtgcctcccctctcctcttctcctttgccttccgctgcatctctatggtgaaaaatcaccattgaaggacctcattgaagctcacagatccagcctccatagaagctccacaagcaagcttccatcagtaaggaggtaagtgtctcctccaacaggatagctgcaaaagaaactcattcttcactcaagagaaacattccagatactatcccgcttagacgacctccatattaactgtttcagaaaaaaacacttgctagcattgccacacctcttgggcttgagtttattcctcaagt

SEQ ID NO: 34725 - DNA, 396 bp, Glycine max
tagcttgtcatcttgaggaatcaggggcaagtaattgaacaagtgtacgtagaatagaatcacctaaattgataaagaaacatcataaactcatacatcctatgcaaacaaggcaaatcaggtcccaatagtatcacttatcttttaatcatcttatcttttatttttcttatcttatcttgttttatctttatcttaatcttttatttttcttatcttttacctttatcttctttatcctttatcttctatctttgtctttattttttataatcttttaattgaatattttatcttctctatcttctattttggtctttacatcttctatcttttctttcacatctttatcttatctgctatattgtcttatctttattttaaattaattatcta

SEQ ID NO: 34726 - DNA, 367 bp, Glycine max
tgacaatattacaaatctcaatatacgttgttaagtgtgattatggatcttcatttggtaaaccatgaaacaaattgctctgtattagttgtatcaatgaaggtgggtaggttaagttttgtgcttgaacctctggccgcgcaacacttgagaaatattgcagcatcgaagtacttgagtaatcttctcaggccactcatgcatggtgctcttcatccatgacttcggcttcaaattctgctatttgagattccctggatgtaggcgaattacaagatgatgactcagcaaagcgagtctcttcaaagattgatgctactgttctgtcgtgtaaaagctttctttttctctttgcgctgtttcttct

SEQ ID NO: 34727 - DNA, 358 bp, Glycine max
  unsure at all n locations
agctntcaatgtacaaacatttagtatatacaactcttatagagacagacacaatacagcagtcacaggcattgaactactccattgtgattgcatggatcatgagtatataagtatcatcacatattcacatatatctcatttatgattacttattatgcacatacctgtctgtccatccaagcaacactgtgacagatcacccaagcaggttgaatattctgggggaggactaggatactcgccagggcaatatgatccccaactactctcttctgcattggaagctgtggatgcatatatattgatatgttaggtaataagacctgctatgagtactccacatacacatgcctcc

SEQ ID NO: 34728 - DNA, 417 bp, Glycine max
  unsure at all n locations
ntgcggngtgagcttacccgcatgtctggctctagtcacggtcgacatctcccactttcatatcttttgcttcgtagccatgacccacatcttccaaccatcaccacctccaattggtagccatgactaatatatttccaccatcaatatctttgtttagtaaaagtgttatgggatgggttacgataagtgtgcttgtgtccttaccctgngtttgcaaacttatccctaaccaaattaatacccaacaatacaggggacaagattgggtggactagacttgttagtattatatatatatatataatattttataaactattcttttaagtattgattaattaacaaaattgtgtcacattatataaggaaaaaatatccatatataaatatttcattaataacattaaacactat

SEQ ID NO: 34729 - DNA, 411 bp, Glycine max
agctttgagcctattcaaacgacaataactttttacatggatgtctgattgagtcctgtcatatatccagacgctcgatattgaatgttgaatctctgagccaatgcaaacgacaataactctttactcggatgtctgattgcgtcccgcaatatatcgagactcatcaaaattgactggtgaacctgtgagctgattcacacgacgataactttgaactcggatgcctgattgagtcctgtcatacatcgagacgctcgacattgaatgttgaagctctgaaccgattcatacgaccataactgtatacttggatgtctgattgacgctcgtacatatcgagacgctcgagattgtatgttgtagctctgagccaatgcatacggacataactctttactcagatgtctg

SEQ ID NO: 34730 - DNA, 409 bp, Glycine max
  unsure at all n locations
tcaacattcaattntgagcgtctcgcaatattacgggactcaatcagacatccgagtaaaaagatattgtcgcttggattggctcatagaatcaacattcaatatcgagcgtctcaatatattacgggactcattcagacatccgagtaaaaagttattgtcgtttgaattagctcagagcttcaacaatcaatttcgagcgtctagatatatgacgagactcagtcagacatccgagtaaaaagttattgtcggctgaattggctcagagcttcaacattcaatttcgagcgtctcgatatatgacgggactcaatcatacatccgagatgaaagttattgtcgtttgaatttgctcagaggttcaacattcaatttcgagcgtctcgatatatgacaagactcaatc

SEQ ID NO: 34731 - DNA, 340 bp, Glycine max
  unsure at all n locations
ttcttgatctaaacaaatatctaatcattccaatccactcaaatcatacaattgctcattcaaatcattctcaaacactcatttcatgcaaaacaatccactacatatcattttcaatcaattcattgttcaaacacgcttttggtacaaacaaacaactcaaagtgctgacatctatataattgaaatttacaacaattgacatatacaatctgaaattaatatgactgaacataaatcataaaataattgaatataaactataatgttcgagatgcacaaatttacatgtcctgctgctgatggtgctcctatgcatgctcattaangatcaacacct

SEQ ID NO: 34732 - DNA, 411 bp, Glycine max
  unsure at all n locations
agctntaaaccaaaacatgtaattgattaatacgtagcaataatcgattaaaacagacaattttgaaccaaaacaccacaaacacataaatggcaatcgattaaatcatggggtaattgattcaaatataaagtttcaaaaattgataactcacagaaacatagtgtaatcgattaacatgaatgagtaatcgattaaaacaatgaaaaacacgaaataatcaaagtgaaacatgtatttttcagagaaaaatcaacttcacatcaacatactaagacatttgaagaanattaatagacatggagagcatatataacaggctacttgtactaagcttagtcgtcattcaatactagacccatctaagatacctagttcattcctaatgaagaagaacctatctctagcaac

SEQ ID NO: 34733 - DNA, 405 bp, Glycine max
tccttgagaagcaaggaaggtagcatcctagggaagcgatgaagaaagcttcctttggaagcgacgaagaaagcttccgctagaggttagctactcacacccctccaatagctaagctcaatcccataccaaaatacatgaaaatgcaaaaaaattcctactacaaagactactcaaaatgccctgaaatagaaggctaaaatcttatactactagggtatccttaacttgtagggtaggtgtgcccttaatttgtagggtaccctacaaacctaaaatgaccaaaatacaaggcccaaaagaaggaaaacctattttgatatttacaaagaaaaatggacccaaccttggctcatggtgatgcaatcttaccccccaagggtattggatagaagactccaagag

SEQ ID NO: 34734 - DNA, 435 bp, Glycine max
  unsure at all n locations
agcttcttcataaacgtggcatttgtgtgcaatacataatgcctaaaacaccacaacaaaatggtgtatcagaaaggcgtaatagaactttaatggatatgattaggagtatgttaatcaattcaactttactcgtatttttgtggatgtatgccttgaaaactgccatgtatttgttgaatagggttcctagtaaggcagttccaaagacaccttttgaactgtggatgaataggacacctagtataaggcacatgcatgtttggggttgccagacagaaataaggatttataatccgcaagagagaaaatnggatgcaagaacaatcagtgaatatttcatttggtatccaaaaaagtcatggngtatatgtttttttgcctaatcatagtatgagaattggtgaaactggaaatgcanggttactgaaaatg

SEQ ID NO: 34735 - DNA, 451 bp, Glycine max
tgtaagcgacactatgcaatactccatcttatcgatgtatgaacttatgatgcagcgctccgaacgccatcaacagctgttccgcaccattgctgactgtgatggtcgctcttaaggtacttaccatggtgaagaaagataccctctctcataaggcctccttcaactgcaataacctatttcctcatgacaacaatcaaggtgccgaatgctccatgcctgtgtgccaatattaggatacaccgtgtcacatgatctgctatgaaaaccactcatggctccgttcaagaaatgagtggccgagcgatgaagtgctttgccgaatgccaacggaaagagaatgagcaattgtgcctctctatgcgaaacgccatagacacaattatccaaccttggtgtcgtcctataacagaacatgcaacaagatctaataacaatgcttggagttgaa

SEQ ID NO: 34736 - DNA, 375 bp, Glycine max
  unsure at all n locations
agctntacagtagattntagtaatgacccactaacctagaattaaaataacttaatgccattaacctagggaattaaaaaaaacttaatggctgagtgtaactgaaattgtggcaaccaaaagtcacccccaatagccaacaagtcatccaccatttggtctcccaaaaggctgatgcctatgttgccaattgggcccttattacaacttgaactaaacctaactaaagcccttttagttgattaacccacaacatatttttggtcagccaactttacaaggattgggccattatttagacagactanacactctaaaattgaaacaaagtggtgtcatttagtcctcctccatttgggccatgatacaactcac

SEQ ID NO: 34737 - DNA, 246 bp, Glycine max
tctcgatatatgatgtcccggagtcggacatccgagcgagatgttatgaccattcacatatctcgagagctagcgatgttcaatggggagcgacaccatgtataatgtccgcgaatcgctcatgcgcgtgaacagtcatgaccattccaatttctcgagagctatcgttggtcaatgacaaccggctatataactaatgaccccaactccagcatccgagcgaatagttaggacccttcacctttc

SEQ ID NO: 34738 - DNA, 434 bp, Glycine max
  unsure at all n locations
agctncatangataccactgggcccagggtcattanaaggtttcatactggaaaattacattccttaaatctcgtcatttttgtaaaggctttttgaatggctttccggntcaacaaactttgcaaatctttgaacatcgtgaaaaaaggccaaaaattaatgtagtgaccttgagcttcaaagctttatttgtcacatttgtcaaataagaaaacctttcaaaagtttcaaaacatttgacattatttataanaagtccccaaataaatactttttttattgcgagcattatcattnntgtatactcagttttatgaataatagtttacaaatacctagttgttntaaanttaaaaattaaagtttattgtgttataaaatctcaaaagcatactcattttattggagcatattttttatgattcaatttata

SEQ ID NO: 34739 - DNA, 431 bp, Glycine max
tcaaaggttgtattgcattagaattccgtttgactcatttttattttgaagattgccttaaaattaaaatttagaaataagaggtttaaatataactaaaagaattaatatatatttttttaaaaatttcattaacttaaaatagatcatctgaaatgaagaaattaaggaagtttcggacatgcggttcaaacttgtggaaaatatgtgtgtgttttttttttgttcgttgctttctgaaatttatgattgtgcgtaacccgaggtctacgttctacaaatgaatgccatttagactaaagaaacatgactccgcattttcatctaaattattactttttagaatgctaccgacacattaacaacctaagcagcacattaacaaaatttaactgatcgattctagttcccaaccctcattttgggttatt

SEQ ID NO: 34740 - DNA, 433 bp, Glycine max
  unsure at all n locations
agcttgtagaattatggngtacccatcacatgtggtactaggtggcggtcgggcgatggtgcacaacaagctttccacatccacaatgcgcgcataaacccaccatcccctgttgcccacctccatctgagctcacgtactcccacgtagcccatatcctcgtttctctcaacaccgggtccccatcaatcctctcaagcttccacaacatccaagcaaaacaacattcaaacagcacaagctatcacagccaagcaaaacagagcanaggcagaaaactctgctcaacacatcaaccaaaatcacagcttttctcacttanagaccccagtaacaattccttcgatccaattcgttaaccggtggatcgactccaaaattntactggaagtctatagtgtataagcctacattgtgaccgttgggatctact

SEQ ID NO: 34741 - DNA, 80 bp, Glycine max
tctatactctatacaagaattaagctctgataccacttgttagacaagtggcctcataaatcttaagagggggggggggg

SEQ ID NO: 34742 - DNA, 422 bp, Glycine max
  unsure at all n locations
agcttcttatccaagggaattcttggtggtgaagctccttcttccttggcttattgcctagtggatggtgcctcccctatcctcttctcctttgccttccgctgcatctccatggtgaaaaatcaccattgaaggacctcattgaagctcaaagatccagcctccgtagaagctccacaagcaagcttccatcaagtggtaatcagagcacaagagcttcaagtaggtgctccttaaacctccattaattntttttctttaccttctcttccattgatgattcttcattnttctccatgtatctcctcacatgtcttgttctanatgttgttaacatgattctttagagtttccaccgattaaacttgctatagaagttagaattgattntctatggntcacatttcttgttcttgttcttg

SEQ ID NO: 34743 - DNA, 397 bp, Glycine max
tgaatcggacctcagtgtcaaaagttatgaccatttgaatttctcgagagcttccgtgggtcaatttcgagcatctcgacatattatgtgcccgaatctgactttcgtgtgataagctctgaccatttgaatttctcgagagcttccgatgctcaatttcgagcgtctcaatatattgtccgcctgaatcggagctcagtgtgaaaagctatgaccatttgtatttgtcgaatgcttccttggttcaatttcaagcatctccgaataattatagtcttgagtctaacctccgtgtgaaaagatgtgaccattcgaatctctcgagagcttgcgttgatcactttcgagcgtctctgtatattatgcgcccgaatcagacatccgggtgagaagtcat

SEQ ID NO: 34744 - DNA, 430 bp, Glycine max
ttcttagctacacacacgcctctcataactgagctcacctccttgagaagcttccttaagaagattcctaaagaagctagagtttaactacacatacctctctaatagctaagttcacctccttgagatgagaagctagaacttagctacacaccccctatagtagctaagctcacccccatgacaaactacatgagaatacgaaataaatccctactacgaagactactcagaatgcctcgaaatacaaggctgaaaccctatactactagagtggccacaatacattgcccagacgaaggagtaacctattctaatatttacaaagataagcgggctcatacttagcccatgggctcttaatctagcctaatgctcatgagaacactagggccgttccttgtatctctggcccaatctacttggagtc

SEQ ID NO: 34745 - DNA, 129 bp, Glycine max
acttcatcttgatgggtattctgccgttgtacaagatctatggacacaatgttgaatgctcttgataggctcctatgcgctattgagaatgaccattcctaatctctacagagccttcgtcgctcaatt

SEQ ID NO: 34746 - DNA, 389 bp, Glycine max
  unsure at all n locations
ttcttcaacctttagtgcccgtttctgccccacatcgtgaaaggagagcattnttggagtcgtgaagtgcgtggctacgagtggaacttcgaacatccaggtttgggtggacttctttctctcttanatttcgtgggtatggnggtttgggagatatgatgggtggctttgttagttttctgctgtgtgatgattatttgtgaaggcatttgctgaatacttgatgaaatcgccatgtttggatgagttagacatacccattctggtttatgggttttggtgatgatgtttgtgatggttatatgctgaaattgctgatggaaatctgttatagacaaagggtagaactaacccaaggttagaaagtgagaatgtgattgtatgagtgg

SEQ ID NO: 34747 - DNA, 403 bp, Glycine max
tataggatactaaggtaatttgagcatccattctggtgctaccaagatgtatcatgatttaaagacgatgttttggtggcccaacataaagagagaggttattgagtttgtgtatgcatgcctagtctgtcagaaggctaagatagaacattagagaccttcaaggaagttacaacccttagagataccctagtggaagggggacagtatttccatggattttgtggtaggactacctaggacccctagaggcttagattctatctgggttattctcgatagattgactaagtctgctcacttcattcccattaatatcagattttccttggaaaagttgactaccttgtatataagtgagggtttcaagttacatggtgtgccatctagcatagtatctgat

SEQ ID NO: 34748 - DNA, 411 bp, Glycine max
  unsure at all n locations
agcttcctcactcttcagtcgcatatatatttcacacctattccggtaatttaaatggccaaacaatacattctcaagcaccttgagaataaattaaacactaccatgggcatgcatattgcaaaaaatatgaccttttctctaataaatcacttcaaaccaatgataactaatcaatattatgcaactaattaaaataaagaatggaaaaaagagttgttttaggactcaaattataaatgaaagctcaaaattgaaactgccttgcatatgacacctaagaaggatagattatgagatatgttaacctttccttacctgtattcgagctctagaccctactatgatatttgagattggcctgcaagcttgattaaacatgcttttgntatagtcactcgtaagaagttt

SEQ ID NO: 34749 - DNA, 426 bp, Glycine max
  unsure at all n locations
ntcatgattaacgaaatctcatctctaagatatggctatacatacataaattaggtgttgcaatggatatccttctattaagctaattttttaaagtattattcctagcaagcacatacaagggtcttgaaatttccattttcgcctgtggcagtgtgagtaggggaagcagacacgtcacacggacacgtggcagggttgccactgcattntacgaaacgagaatgggcatttcggtcattgcgtagggtagtactagggtttttggggtacattcacatagtcggntgttgttgctccaatttcttattntggtgcatgcgagtgaggggctttgtaaattaatttgttctagtaatagtacgggagctaatagtagtatttctgtgattggtgttgcagattgatcaagtgaatataatattg

SEQ ID NO: 34750 - DNA, 426 bp, Glycine max
  unsure at all n locations
agctttccttttttctcttttttttttctctcacctgatcttcattcttcttcctcttttcacttctgttctaccattttcttgcacaaaatttcgtgccttttccattagtgataatcatagaaggataaatacttcatccatccaaggatccactccaagcaagactgaatttgcgttctggtttagcatttataatctttgtgaataaaatctttctcttcaatcctatttccgattttcatgattatgattatgcttaggactgaaaacggatttggctatggattaatttcctagatttgaaatttaatcatagactatttggaggattctccaacctaatttgtgatctcgaacaatctaaggatagattcgattgaactatctctaatgcattngactgaacttttacactgaacatca

SEQ ID NO: 34751 - DNA, 429 bp, Glycine max
  unsure at all n locations
tctcaaggaagttttcttaagaaagcttctcaaggaagttttcttaagaaagcttctcaaggaagctacctagtctataaatagaagcatgtgtaacacttgttgtaactttgatgaatgaaagtcttatgagatacacttcaaagttccacttctttccctcttttattccttcaatttcgtgctccccccttctctctttcttttcctccatcgaagcatcctctccaagctttttatccaaggctcatcttggtggtgaagctccttcttccatggcttattccctagtggatggcgcctcctctcccctcttctcctttgtcttccgctgcatctccatggtggaaaatcaccattaaaggacctcattgaatctcanagatccagcttccatagaagctccacaagcaagcttccatcaacata

SEQ ID NO: 34752 - DNA, 414 bp, Glycine max
agcttcaacattcaatttcgagcgtctcgatatatgacgggactcaatcagacatccgagtaaaaagttattgtcgtttgaatttgctcagagcatcaacattcaatttcgagcgtctcgatatattacgggactcaatcagacatccgagtaaaaagttattgtcgtttgaatttgcttagagggtcaacattcaatttcgagcgtctcgatatattacgggactcaatcagacatccgagtaaaaagatattgtcgtttgaattggctgagagcttcaacattcaatttcgagcgtctcgatatatgacgggactcaatcagacatccgagtaaaaagttattgtcgtttgaattggctgagagcttcaacattcaatttcgagcgtctcgatatattacgggactcaatca

SEQ ID NO: 34753 - DNA, 416 bp, Glycine max
  unsure at all n locations
gtgagccaatacaaacgacaataagttnttactgggatgtctgattgagtccagtcatatatcgagacgctcgaaattgaatgttgaaaccctaagctaattcaaacgacaataaatttttactcagatgtctgattgagtcccgtaacatatcgagacgctcgaaattgaatgttgaagctctgagctaattcaaacgaccatatctttttactcgggtatctgattaagtcccgtaacatatcgagatgctcgaaattgaatgttgaagctctcagccaattcaaacgataataactttttactcggatgtctgattgagtcccgtaatataacgagacgctcgaaattgaatgatgaacctctaagccaattcatacgacaatatctttntactcggatgtttgaatgagtcc

SEQ ID NO: 34754 - DNA, 426 bp, Glycine max
agcttctcccccaattttctataaatagggggagaagtgaagtgaaaaagggttcagccccttaggcacttctctctctttctaatttgcttggaaaaattgtttccgtgaagaaaatccaagccgaggcgcttccgaaacgtttccataacgtttccgtgaggaatttcgggaaggtttcgaccgttcttcgacgttcttcattcgttctttatcgttcttcgatcttcaacgggtaagtaactcgaaccaagcttttcgattcattctatgtacccgtggtggtccacattgtgtttcgtgtatttctattctcgcttcatttactttttatacccccttttgacgtgcttaagccattttatttaagtcatttctcgcttaacctataaataaaataaatttccaccgatcgtttgaaatgtg

SEQ ID NO: 34755 - DNA, 367 bp, Glycine max
  unsure at all n locations
tgtgaaagtccttctgattctatttatgcatttctgactttatggcatgagatgaagtgtaaagactggacctcttgctagttgttattgatgaaaagcttaaacacttgtgcttgagtgaaacagtagccgtgagactgtggtttaagctactttccttgatatatgtcttatgcctaactccaattaattgtacaggatacattatattcttctctttgaataattgcatgctttgtgaaagacaagtgatgagggcattttacttcattctattatcatgcaatcaatagtttttgttgcatacacctttgtacatagtcactgcatattcttgtcacttgnngaccaatgagttgttctttat

SEQ ID NO: 34756 - DNA, 375 bp, Glycine max
  unsure at all n locations
agcttgtattatttgcaagatcatcttccttgacaactccgtgaaaaagattgccgtcaatatgaagagataacaatttagagagtgatcgaagactttcaaatggatttccactgaatttattcatagagagatcgagatatcttaatgatgaaaagtttccaaatgatctaggaagagcaccaccaatttgagttgtggaaaaaagtaacgtgtcaatatttttaaatgccccaatatgatctgtcagattgcctgaaagtcgtgaactctgaactgcaagtcttgtgagtccatgggaaataccaggagcangaatttctaaaagtcattaaccctgtggttgagtttgagatatgatanatctatcaccct

SEQ ID NO: 34757 - DNA, 401 bp, Glycine max
tgacagtgtttgatgcatcagggaacaatttcactttagtagtgggtcctaattggattcctaattttcaacttacctatttggatgtgacatcatggcagataggtcccaactttccgtcgtggattcagtcacaaaacaaacttcaatatgttggactgtctaacacggggattttagattttattcccacttggttctgggaagcacattctcaggttttgtatttaaacctctctcataatcatatccgtggtgagcttgtgactacaataaaaaatccaatatctatccaaactgttgatctaagcacaaatcatttatgtggtaaattaccctatctttcaaatgctgtgtataggttagacctttcaaccaattcattctctggatccatgcaa

SEQ ID NO: 34758 - DNA, 433 bp, Glycine max
  unsure at all n locations
agcttaagctccttcaactgcacaaggctcttaatatttgaagagtatccttgtggaaccttcacccgacgaagacactgacaaaaacttatcttctccttcttggacaaagtatggcaggctgngggcaagtaaattttcttcccatcagaccttgaatgcaactgtgatcgtatacccatatcagctagatcttgacgggtattcaagtcatccttcgtcttgccttgaatgttaaggagcgtcccaatcacactgtcacaaacattnttctccacatgcataacatcaatacaatgtctaacatcaagatcacaccagtacggaagatcaaagaaaatggacctcttcttccatatgcaactctgacttttatccttcttttgggtcttcccanatacagtattcaggtgttgaacccgctgatatacct

SEQ ID NO: 34759 - DNA, 417 bp, Glycine max
  unsure at all n locations
tctagaattnttgtcagctgcatcaaaatgggaggcaacttgaggtttttgagtctttgcatcaactcatgctcaactttagcttggcttttatgttaacagttgcccaaaaatagagcaaatcgatttgaaatttgttcatgaccatatccataatgctccatcactagcagctgcattaataagaatgcactttcatgactgttttgtaagggtatgcgctccaatctttaagcttctttcatttttacttaacaagtacaatgttattgttagattaaggttaaggagctaactaagatgaagcatttcagggatgtgatgcatcagcccttttgaactcaacaaccaatcaggttgagaagaatgctcgtccaaatcttacagtaagaggctttgacttcattggcattataa

SEQ ID NO: 34760 - DNA, 411 bp, Glycine max
  unsure at all n locations
agcttatgctgcagacatctataatagaacccctcagcagcanaaccaacaacaacagaataattatgatcttttaaggaacatatacaatctatgttggagaaatcatgcanatctgagatgggcaagtactccaaaacaacaacaacctgtccctcctttccagaatgctactggtccaagcaagccatatgttcctactgcaatgcaacaacagcagcagcagtcacaacaaagacaacaattaactgaggctcctcctcaaccttccttagaagagttagtgaggcaaatgaccatccagaatatgcaatttcagcaagagacaaaagactccattcagagtctaacaaatcagatggggcagatggttactcagttgaaccaagctcagtcccaaaattctgacaa

SEQ ID NO: 34761 - DNA, 406 bp, Glycine max
tatgatcaatgtcagaagatgctctttgccttaaatcactaccccaatgatcaggaatttgaatagctgcaagcaaagaatgtatatattaagaaatatattgaacaggtattcagcctagctgactacccaagaataccatggtaaaacctttaagatactaaagcataccctatagaggtgtcaagtattcagctctgccgaattcccaagtaccacaattaccttatccttcaaaggttaccttctgtttaacaatattaggtatttgtccctagcgaatacccaagcaccatggctatcctatccttcaaatggtatcttttgcctaacagcatcaagaatgcgaccatgtggaatactcgagtactatgaatatcctatcctccaaaggttatcctctatt

SEQ ID NO: 34762 - DNA, 429 bp, Glycine max
  unsure at all n locations
agctntggttcaatttagcattgagagagaggagagtgaaaaggaagaagaactgaagaaggagaaggggtaaagcagaaacacaaacaaaagctaggggagcgtgaaagccagtgcgaacgggtcgctgttggggaaaaaagcaaaacacgtgtagctattttaattnttttaaaattccaactttgtcaactacatgcgtattttctttttcctcttactataggggctnttatttttgtggtggcattggttagccaattgttgataaatattttaatgtattttgctgataaattggtgataaatattgatattgngtgtaaataaaatatttttttagcacacattatattaaanaaatactaggaaagttaagaaataatttcttttaatgaatatccctcaattntctctttcttagttatt

SEQ ID NO: 34763 - DNA, 433 bp, Glycine max
  unsure at all n locations
tcaacaacgttcgtcgataagcacttatctaacaaaatttgagtccctggcaaattgcatagcaggaataccagctcagtttatgatgagttgctttatcttggggttgagtcccgccattcgccaggaggtgcaagttctacaaccagtcttcttggctcaagcagtggcgtatgcacgcttataggaggagaaactcctcgatgcacgtaggtcacccacgcagcattttcaatcggccaccgttacaaccacggccacgtgatcaacctcagtcaaccccacaccaccattgttgcctactcctcaaagaacctcaactccttccattccttttaagtgtctcacatcggaagagcttgcgattcgccgcgagaaaaggttatgttttcactgtgatgagaagttntctcgaggtcacaagtgttcaccc

SEQ ID NO: 34764 - DNA, 413 bp, Glycine max
  unsure at all n locations
agctgctttttttcttttctttctggaatctattattagggcagccagaatctctaatcgtggctagtttacaactcgaactatgcgttggaaagactatacacaactgttagtgtcctttaaccctcattttactaaagccagaaacctggtaatctatcctactaaatcagttataaggttgcatgccttgaccttgcaatgtcttcatgattcatatatgcaattatgtgatagctattggccatactagtgagtgaattaatgatagagtcgacattttttttgttaaaaaaaacgatcgtttcgttcatgttggtgcaagataactgctgaggattgagttataactatcgttgtcgcggaaatgggctattccatctacatgggattccncttggagtaaagtctta

SEQ ID NO: 34765 - DNA, 420 bp, Glycine max
aactaagatgcttagattacccagatttccattagagaagaatcttcagatgtatctaatactgctcaggataatgctttacccaatcagaaggaggctacatgtggaacactggctgtcactgtgactagcgcagcttctagtcggccaaatgaatccacccacttatttacctcaattaatgctaacattccggctctaacgtcaccggcacagaagaattccgttaagaagccaacggatcgggccaaagctccttttgagaaaggctacagccaaacggactggctcaagctcacccaaacacatgctgaccttgcaagttctcatactcaatttttgtactatgcaatctcaatcattaactttggtggatcagttttcaaaatttcttccaatttcttagagctttgtaagaga

SEQ ID NO: 34766 - DNA, 424 bp, Glycine max
  unsure at all n locations
tatctntgatgatatggtcttcaccgacgaaaggatcaaagtgggtctgaaaagaggcaaatctgatcatcttgctttgataaatgcaaaaaaaaagctggggcaaataaagagggtgaggatgaaggagaagcccgtgttgtgactgccattcctatacagccaagtttcccaccaacccaacaatgtcattactcagccaataacctaccttccccttacccaccgcccagttatccacaaaggccatccctataacaaccacaaagtttgtcttccgcactaccaatgacgaacatcacctttagcacataccaagagcactaaccaagaaatgaatgttgcagcgagaaagcctgtagaattcaccccaattccagtgtcctatgctgacttgctcccatatctacttgataattcaatg

SEQ ID NO: 34767 - DNA, 424 bp, Glycine max
tgccgcccagctcgcctgagcgagcaaggttgcttcctccagaagcaacaaccttctggaggaatcttaaggagggcccaagttggcccgattgctatttgcacccccctttttactaaatgcacccccttctatttttttggtaattctttttccgtaacgttatgaaacgttacaaatttcgtaacgatacttatttcccttctgcaaggctacgaatccttacgtattatgtatttactctttgttagctttcgaagaagttacgaaaactcacggattgcgcaaaaacacctcttttcgacttccgcctcattacggaatttcatggattgtgcaagcctgcttccttttgcttttcgagacgtctcgggacttcatttattgtgcaaccaatgactctgagcgactcggacaaaccaat

SEQ ID NO: 34768 - DNA, 421 bp, Glycine max
tagcttgcctgtccgatgcagcagtaatgatggcccgagttatgttggggaacggttacgaacccggaatgggtttaggcaaagacaacggcggcgtaactagcctgataaatgccaaaggaaatcgtgggaagtatggtttaagctataagcccactcaggcggatatgaagagaagcatcgcgggaaggaagagcggtggtcaaagctcgcgttggagacaagagagtgaaggaagcccgccctgccacataagtagaagctttataagcgcgggtctgggagacaaaggtcaagtggtcgcaatatgagaagatgatgttttgagtacattggatttggtacgaccatgcccttttgatttccagctaggaaattggcgagtggaggaacgccctggcatttacgcaacgagcataat

SEQ ID NO: 34769 - DNA, 427 bp, Glycine max
  unsure at all n locations
tgttacagaacttaggaaaaatcaagaacaagcttgttcgcacatcgttcgcgtgtatgatatccactcgacaaggtttgaagtagaggagaccttcaatcctataacgcaacgtggcggacaaaagtgggcagttaacttgaatggccattattgtcaatgcggaaggtattctgcgcttcactatccatgttcacacattattgcagcttgtggttacgtgagcatgaactactaccaatatataaatgttgtttacaccaatgagcacatcttataagcatactccgcacagtggtggcctcttgggaatgaagcggcaattcctccttttgatgaggcatggacactaatccctgacccaactacaattcgtgcganaggtcggccaaaatcatcaaggataaggaatgagatggattgggtc

SEQ ID NO: 34770 - DNA, 430 bp, Glycine max
  unsure at all n locations
agcttctcatttgatccaacagaggaggagcatacaaactatttcactcaagtcactagcataagagacttggtcattactatcttgaaagaattctaaacatgaaaaaagggacatgtcaaaaggtctaccaatactttctgatagtttgccaaactatcatgcttgtcaatttggtaaacaaaacaaaaaatcattccccaaatcatcttggagagcctctcataagttgtagctaattcacactgatgtgataggacctcaaagaacaccatcactacaaggtagtctctactttattcatttcatagatgactntacaagaatgtgctggattntttttcttgaaattcaagcatgaagtggctgaagtatttgtgaagttcaagataatggtggaaactcacagtggctgcnagattcaatgact

SEQ ID NO: 34771 - DNA, 411 bp, Glycine max
gtgaacaatatacttggccttcatttaactgtctctgggcttggcggccacgctcagcatagtactttcgacacctactgtacgttgatttcaccaatgctgttatgggaatgttgcgacaatcctttaaaaccttattgatacattctgagaggttcgttgtcatgtggccatattgacgtccttctctatcgtaagccatcgtccatttttcttttgagatgcgatcaatccatgttgctatcgctggactcagatcaccaaagtttctaaattttgatcaaaaatgtgcttgcaaggagtgtaggctgcataaaattagttatgaataacaatttatagtataaatgatagtaaaataaacgtggccatcaaatatgaaattgtacccaacttcttcaacatttcttt

SEQ ID NO: 34772 - DNA, 410 bp, Glycine max
tgcttcatatgcaggattttttattccaactgtgtgatctgcttcagcgagaaattgcaggggaatttgtggatttgccacaaaacgctgaagtcgatgagatttgataataggttcaacctgttggcgccataacaggaagggcaaatcatcgagcttgtgagaaatgaaactatgaagagcaaaatgaatgaacgagttgatttgagcaaccattgctgatcataccaagcgccacataccatatcagaattcttacagatgattttttgagaacctaaagagaatagaaatctgagatagtgactgtgagtcttcatcaaccacttgacttgaatatagatctttgtatttatagacagaactgatattagatcatgtgtcacaactaattaacagctgtcataact

SEQ ID NO: 34773 - DNA, 421 bp, Glycine max
tactatgttataaacaaatatatatatatatatatatatatatatatatatatatatatatatatatatatatatatatatatatatattaggggctacctgtcatcttttacactccttgtacagagagagggagagagagatatggcctaagctatggcgttagcgcgcgcacagggcgtaatactccatgatgcgcgtgagtctcacacgcaggatatacaaacgggctccgataaaaaatattgtcgagtgaacatactctgggagcggcataacaaatatgtaggcgatttattctaaaagcacgctttgttcgactcggataagtgtattatatttatcatattgcgagacacagtatgtaaagtatgtctttctgaagagatatgacctaaagtgcgagagatctccttgtacg

SEQ ID NO: 34774 - DNA, 286 bp, Glycine max
tgctcataccttgtaatattgcgatcatgctgtcatttccagtgtttacgtaatctgcatgcttacttctacagcgtattcagattgaagcacctttacactggctgttccatagacgccgagattacaaattgatcaagattatctgatgagcgtgcgatcacctacgcacaccctatccatagcgcaagctacagccattatctgacgattgatactcactggctcatatacgctataagtgtcttgcacctgatggcagaatctacatctctctagatgaata

SEQ ID NO: 34775 - DNA, 332 bp, Glycine max
cttattctatttatagccttcatcttcaagtattctttggtctcccaacggttggattgaaaacgcggagagctagctgatatcactactctactgactctaatactctggcgtcaatagaggttcccttctatcatgcaccagacatgcttaatggctaccttatcttatacttcagttggaaagtcacttctttcatcacaacaaagttgcatcaatagagagcatcttttgataaagaacactgccttctacactatggactccatttattcttcataggacaatgacacatcctaagagacatttttttgcatgaaaatctcctacac

SEQ ID NO: 34776 - DNA, 421 bp, Glycine max
agctttcatggctttcaagaagaccataggcacaccaccagttctgagtcgacctaggcctagagtatccctactcttgtattttttagtagttgacagagtcggtagctcaacccttatacaaaaagaagggaagcaccagctccctatctatttcgccagccgcaaactccatgacactaagaaacgctatcacatgatagaaaaatgtggcgctagcactcattacctcggctcgatgtctcaggcctacttccagagtcattaagtggtagtcaaaatgaattacaccatcaagcaagttttgagataacaagaactcagaggaaggatgttggtctggtctatataactttcagagtttaacatgcagtatgaacatcacagccgcatgaagacatagttcatggataactttcta

SEQ ID NO: 34777 - DNA, 417 bp, Glycine max
tgttagagttttagtttgtgttaatagatgctcacatttgtatgttggatttatgcatatatgaatattcaatgctttggtgttttggtcctctttgtagagaataaatgttattttcttcataggatctgtccaaatgtatgaatcagaaagaagtcaactaaaaaactgcctactacattaaaaggcatgtcaaaacaagttgcaaagtatttgcatacagaaaagcaaatatgatcacttacacaagatatgaagtgtagaaatagtatgataaactgatttatcatatgaacatgacaagttaatgacttgcattaaatgcttcgatgattatttccaccaatagatgaagatgaaaacttcacaagttacaactatcatcctttgaacgtgttatatatacttgaagacttg

SEQ ID NO: 34778 - DNA, 425 bp, Glycine max
  unsure at all n locations
agcttgtttcttgcaattccaagacactagagagcttcctaataggtggcatgtctaacttgtgctttttctatctaatttgcaacctgcaaaattagaatatgaaaagcctgttagatttaaggaagtatccttgggatacctcaaacctacattggttgtgtccttaaggtacttaatgatctttttgatagatgttaagtgagattccttatgattggtctggtaccttgcacataagtaaacactccactgatttaagtagaaaagtgatccaatcatacctctatatcttgactcatccactgattntcctttctcatctaagtcatggtaggttgaagttgccattggagtagatgcttctttgcattnttccataccgaatntcctaattagttntgtacaatacttggtttgactaa

SEQ ID NO: 34779 - DNA, 392 bp, Glycine max
tgtaaccacctataaataccatgtaatcattcgttgaatgcatagaataatacttgatcatttcttccttctcttgcttctgggaggtttcttgggcctcgaacaccaagtataacagtggtgctttcattgagcatcaatggcagatggaacacgttctaaggcatcatcagagcgtctggaagatgcaattgcaaagctcactacttcgcaacttgctatgaactcgaagattgatgatcttctccatcgaatgtctcagctcgaggcgaatcaacagcaaccgcaatctccgtcgtcgtcgttcgcaggacacatgtcgccgtctcaaagccccttccaccgtatgaagcttgatgttccgagaattgatagttctgatccaacgggtt

SEQ ID NO: 34780 - DNA, 428 bp, Glycine max
agcttggatgttaggaatattgatgggaaccttcttttcttcctcttcaaggctcatgaccagtagctcaaaagggaggaaatggagaattttctttctttataagaggtttgtatgtgagagagagaagcgattagcgagaaaattggagagtggtgagactttgtggtgggttggccatgaaggaaggggtgctatgtgtcaactagctacgtgggtgaggtggaagattgtgtgtcaccaagtgagcttgcatgagaggtgaggtgttggctaattatggattagcttttatgtacaccaagcttagtttaattttacactgtgtaattataactcattaacattctatagcaactcttatcatcacatctatattagctgatctgtaatgacccgctgtcgctacatggatctagaaaccatat

SEQ ID NO: 34781 - DNA, 358 bp, Glycine max
  unsure at all n locations
ntgatgcaacaatcttcatcatcacctgcacaccagactgaatatgctcttctctacanagggaagacacgtatccgagacaaccaggaggtagaattgacgagaaatagtgtcaaatatttcagatttggcagatcaggtcatatcaaaagaaattgcagaactagactctntaaagtgaatgctacatacgaagaagatgaagatgactcatttgagtcacttacannnnnccaatgcttcgccatctacgatcggacgattggacggcccggggtactagtcaattacctagattaccagagagaatggatcctagactctagttgctcacatcatgtaatangaaagggtgggt

SEQ ID NO: 34782 - DNA, 426 bp, Glycine max
  unsure at all n locations
agcttcctcggtgccattcctgcgaaggcaaacatttggaaagttagttntagtgggacattactcttanagcaaaaatggcatataacctcctcccataaatacaaacatcaatgtaaatttagagcaagcttatgcgcctatttccttacaaacgttctcttgcacaagacatttaaccgaaaaaatgcacccatatacaatcaaggcagtttcgttacctagattatttacacgtacctccaaggtgtatttgttacttacatcacacacatctccttggctaaattcacatacatgcatactcaaagcattntggggcaccaaaanatgcacctgtgcacatcttggcatttctaatacctatacatacgcanacttcatgatgaatcttgactatctacacaataaggtgctacatttcat

SEQ ID NO: 34783 - DNA, 409 bp, Glycine max
tgaaggcaaactggatgcgttggtcaacttggtaacccaactggccttgaatcagaaatctgtacctgtcgcaagggtttgtggtttgtgctcctctgctgaccaccatacagacctttgcccttccatgcagcaacctggagcaattgagcagcctgaaacttatgctgcaaatatttacaatagacctcctcaacctcagcagcaaaatcaaccacaggagagcaattatgacctttccagcaacagatacaaccctggatggaggaatcaccctagccttagatggtccagccctcagcaacaacaacagcagcctgctccttccttccaaaatgctgctggcccaagcagaccatacattcctccaccaatccaacaacagcaacaaccccagaaacagccaaca

SEQ ID NO: 34784 - DNA, 321 bp, Glycine max
  unsure at all n locations
agctntgagccaaaatcctgactcaccataaacctttgacccaggtgagaatgtcaattcttaccctcggaagcaaaaaaaaaggggagagggaaaatttccaatcaaagaggaagcaaaaaaggagagaaggaaaatttccaatccaaggaaaaaaagagaggaaagggaattcccaatcaaagagtgggagaaagccaaaagaaaagaaagaaaattcccaatcaaagaatgggagaaagaaaaaagagaagaagaaagggaagaaaagtcccgatcaaaaaaaaataatatgcagaaaggtctttggaccggacaata

SEQ ID NO: 34785 - DNA, 441 bp, Glycine max
  unsure at all n locations
agcttgacattttaatatttaaaacattcttataaaacaaatccaaacaaatttcacgaagagtacaagactactctaaccggctcatatacataagtttgtttaacaagttcatttgtaaatgatcccaaacttgcttccaattaggccatcaaattaattaatccttaattaagcctgcttatgtgagatccaactcagctatatccgntttctttatattattttctgcctctttgattaaaaactaaaatgtaaataaaaaaactaacaatcaaaaaagacaatattactttctaatcacatatgttgctttttaatctggaagacacaaaacggagagcanatgatttccatccacttataacctaccaatgttggcctttattcagaccagcggctagtggccattggctttaanttaatcgtaatataactcat

SEQ ID NO: 34786 - DNA, 441 bp, Glycine max
  unsure at all n locations
aaactcacgcttcacctttaagattaaagaccaaactatatcaattacctttatttgatgatgaagctccacagttgaaattgtggagagcttgtttctatgactactttcctaactttaaaactctggtgtcaatagaggaacgaatttataggtcccagagttcgttaatagttggttatttttctgagaaggttaatagttagttattaggtttgttagtaattagcttgcacggcgagcttttctctataaaagacacgcatgagcaccccttatataataatcatagtccttctatctattggttttctacataaacatctcagaatttcaccttcaacttaaacaattaaagatttaagactaggaatctaanacatggctaaatttgacaagtttttgagtataaaattaaccgtcccaatggaatgaaatatt

SEQ ID NO: 34787 - DNA, 426 bp, Glycine max
  unsure at all n locations
tatctnttgcttgtttagagatttctagagagagaaaggtccaagttccagagagttttgagagcttttgctgtgagaagactggcagagaacagagcgagaagaggaaaccatctgagagcatgagatgagtctgtgagtgattgtgaggttctagaggtggaggagacatccccactacttgtatttcttcaatccttcatttttctcttctctttgttgtaaaggaagcttcccagatatggagagctaaatcctttggtgggtcttccttgtaggtacttgatgtaaatacttgtatatctatttaatgatgttttatgtgttctctgtgctattagtacgtcattctagcgtgtttctgccttgatcatgtagattcatgcttctgtaggatcattcaacagttgaaactggttcgattct

SEQ ID NO: 34788 - DNA, 427 bp, Glycine max
  unsure at all n locations
ntggaaagtattgtttttcaccttctcgctaagccaatctactggcttcgcgagcatttgctaagtgcaacactcctgngctaagcgtgaggaagaatccagaagaagatgagttgtacatgttcgctaagcacactgcttcatctcactaagcgctccgcttcagttcatccgctaaacgagaaaggcgtgctaagccaaaaatcaccaaagtgcactaagcggaccataagtgcgctaagcgcacgagcatgaacaaggacacctatttaagcctaaaatcagattttgtgaagagagtttggactgggattcagagctttgcatgtctagggtttctagagagagaaaggtccaagttccagagagttttgagagattntgttttgtgaaaatctgcagagaccanagcttgaaacaggaaccg

SEQ ID NO: 34789 - DNA, 430 bp, Glycine max
  unsure at all n locations
agcttagtatccactaacaagtacaaaccaaccgaaagaaaaattgaaaaagtaaagaagagagaaaaagtaaataaacatgtagaacaccattccaccaccaaataacacgtcaattaaagaaatgtgattggacagattatatatatatatatataggagagagatcaaattacattaactttaactttgattaagtattataccgttcaataatttttaattggataatattttcttaaaacctataatgggattgaaattttatttcacttagatcatatatacaaaattttatattaatccaaaattatttgttacctcattcattcagattaaaattgacctaatataaactnttcaaaatatattaaaatatagatcgtttgattaccttattattgttcaattntgacaaaaattcacacaa

SEQ ID NO: 34790 - DNA, 399 bp, Glycine max
  unsure at all n locations
tgcattcctttgattntctcactgccttcatactcttccttaaaaaaattccagattttgcgtgttgttttcatcatcattattctgttgaaaatgactggagatacagctgtgaacaaaattgatttaactttggactttcgaagcctcctttctttgtgacttttcatttgggcaacagtgggattatttggcaaaggaggaacttcgtagtcctcttctacntgttgccatacctcgttagcatcgaaatatgcttccatnnngacagcctatattngatagnttagtccatcaaatacgggtacagaaatggtagtaaaggaggtttcagattccatcttatgtgtggtggctacttggngcgtgtaggtgtttgtgggttatatcacagatctc

SEQ ID NO: 34791 - DNA, 546 bp, Glycine max
  unsure at all n locations
attgaagcatttgtaaccatggcgaatccagctcgagtccagctgagcacctggagatcctctagaggcgagctgcacgcactgctatctcagattcttacacctggccgacaattgtgggagccacgatggtatgaggtgaccttgacttcatttacgcacacatcagtacatggtgtgtctgggtgaacatgaggtacagggcatcatatggaagactatgagcgagcttatgcacctagttccttgcaaacgtgactcttgcgacccattgttctagcgagaaaatgcacccgtttaccatccatgaagctcttttccctagattatatacacgaacctacacagtgagattatacgtacatacacacaattccttggctaaagtcacatacatgcatatctcaagcattatgtggcaccacataattgcactctgtgcacatgattggcatttataatacctatacctacgcctacttgatgatgaatcttgactatctacacaatatagtgctacatttcatgctctttnttcaaggtctn

SEQ ID NO: 34792 - DNA, 390 bp, Glycine max
gattttatggaacgagttcgataaagaaagtatcttctaataggaagacttgaactcattcattcctaatcctgaccaaacatgatcgtaatgatcaagatatgcgctcctatcctatcattcactaaaactgtattttctacgaatataaccacacaaacaagacagggaagttcagaggtaataatgcctgaggccaaaagaacagcgagtgtatacataatcataccacatgactaatcccaacacagggaatacatatggaggacaagatctgaagttattactgacttccctacataggtcaagaaataccagccatgttggttagaagagacacacttacaatgcagaggtattgcactttcaagaacagtacaggtatcattc

SEQ ID NO: 34793 - DNA, 414 bp, Glycine max
agcttacaaatttgttttaagtcagttgaaggaccaaagtaaaaaagctttttctgttattgcttgaattcaaataggtacatatatatagagagtacaaaagagagagagggaggagagaggctatgacagtgacaatgcactgttgccttctgaaaaaaaaggctaccaactaagttaccaaacatggctaaattacaaggatattcaacactccccctcaagctggagcatataaatcatatgcaccaagcttggtacatatagtctgaatcttgggtcctcttaaggacttagtcaaaatatccgctggctgatcattagaaccaatgaactcagtgacaatctccttggacagaagcttctctcgaatgaaatgacaatcaatctctatatgcttggtcctctcatgga

SEQ ID NO: 34794 - DNA, 431 bp, Glycine max
  unsure at all n locations
tctcgcanagcttacggtaagatctgggacctagccatgtcataggtctccacagaggccattgcctccctcgcccaatattatgaccagttgttgaggtgcttcacctttggggacttccaactatcacccacggtggaagagtttgaagaaatcctgcgatgccctctgggaggaaggaaaccatacctcttctcgggattctatccctctttagctagaatttctaagatagtccaaatctcgacgcaggaattagaccacagaaagcaagtcgaaaatggggtggttggagtaccaaggaaatgtttggaagcaaaagcaagagtcttggcaggtaaaggcgaatgggccccaatcatggacatcctcacacttttgatcttcggaggagtcctctttccaaatatggatgggttgatggacatccc

SEQ ID NO: 34795 - DNA, 423 bp, Glycine max
atgcttgtgatttggtattcaaatggcatggtcaattggcttcatagagtaagtggtagaatctaattcaaagtctacttatctttggtctagcagggttgtgcgcgcgccttctcatgcttgttataagttgttttcagtgatcaaatctttcaaaagttcagtgatcaggatgttcggagtcatgctttaaggaagggaaaccaagttgttgatgcatgatcaaagtttggcatttctattaatggtatttctataattctttatattttattgtgccttttatttataatgctgtaaaggctaatttaatcttgtagctcttaataatagtttattggtgtggcaatagcccttgtttatatatataaacaagggagaattctttcgtatgactgatttgaacaatttataaaaacacaa

SEQ ID NO: 34796 - DNA, 417 bp, Glycine max
tgttaaggatcttgagatttacatggtgcccagttacattgttagtgtggtacaagggactgagggagcaactcccaaaaatatctagatatatgtttgcttgggtgtttgactaaggttggtgtctcaacaaattgggtcaaccctaacttgatgaggtccaatgtatactttcattatctcaaagaatgcgtgcaaatatgaattacaagatttattgttagagacaattgatagatacattctaatttggatacataaaagtgttcatgcggcatttaccgattaatcacaatgcccatcatgaatcatgatccatgtataattcaaaatagattatgattcactattttcttcacatgatcaatccataagacaataacaatcaaacacttgtgactgtaaaaaggagaaatt

SEQ ID NO: 34797 - DNA, 417 bp, Glycine max
agcttttgttatcggtcatcttccataactctaaggactgcagagcacaaggaagaaaaatatacattattgtcacagtaaacaagaatgggatgtttttagagaaacagaagtgttgaaatgaggatagtttgcagtattacaatgaaatgggtgcagttttttacatgggtctgatgcatgcagtccagaagtaaggtttttgaatccatgcattcattacaacagataatgaacaaaagcttaccgaacttcctccaatcaccaacaaagttgaataacttggatgataaacacaggaatgcaattggctcccagtggagctgaactcatgaatccattctcctcctgaggtcatactccaaaccttcaccagatttggactcacagatgccaaggcatcaccattcccatccc

SEQ ID NO: 34798 - DNA, 390 bp, Glycine max
  unsure at all n locations
ntagtcaaacagaataatccaaaaatgtcaaagaattgtgtgttgaaaaagcataacaagactttctgtgattggtttaaagatacaatctttgcagatgaaaatgctttagaaactttaagaaaactagctgacgggcctaaaagaaatgttataacttggcaaggatacgacataaacaagtattcattttacacaaaatgggcccagctttgccagactcacagagacctttcttgggacgtatgtaccttgccatttaagttgtttttaaaaaaacattaacttgttataattcattctagcaatttgaaacgctattgttttatttttgcaggatgtgtggaaaaaggcaaaggccatccagaaatagaacactgccccccacgt

SEQ ID NO: 34799 - DNA, 416 bp, Glycine max
  unsure at all n locations
agcttccttatatggacagcattaattatcattgccaaaatagtgcaagattacaaaggaagcaggcacaattgatcatagcaatataaatcgcccatttttaccattactctatactctntttggcactgtgtttccgttcttgttaataagataagaaaattccttcttcttgattcttctttcactaaacatattaaacacgttaattaaacatgtactcctatacccaactatgaaaaaatatcgtatattatgtgctccaaaacttccttggaaatttcgtanaaaagaagattataatagtaaaaaaaaaaaactccattattagtctagtactacaaacaaaaataatgtaataatagtaaaacaccaatcaggtaatgccaaccattccacacagcattttccacaaa

SEQ ID NO: 34800 - DNA, 400 bp, Glycine max
tgtgtttttcgataggaggaaccagtttgagttggaggatctgcttcgagcttcggcggagatgctcggaaaaggaagcttggggactgtttacagagcggtgctcgatgacagctgcaccgtggctgtgaagagactcaaagacgctaacccctgcgagagaaatgagtttgaacagtacatggatgttgtagggaagctcaagcaccccaacattgttagactcagagcttattattacgctaaagaagacaagcttcttgtctatgattatctgcccaatggaagcttgcatgctcttcttcatggttagttaaactcaaactcgagcgagctctgatgggacatgatccttcatgataaactttaattaatttgataagcttgattgtttatatat

SEQ ID NO: 34801 - DNA, 435 bp, Glycine max
  unsure at all n locations
agcttgatatagtccttagtaatccanattctatatgtatgattgcattanatgagatgatgtgcanagttgagaattttactttcaattggtgggatttaaacactcataactgagacacttatgtgcttgagagaaacactagccttgtgaggaatgaagcatggtgaatcttctgtgatgcttgtcatacttgctaacctattttatgtccaagtgcatcctttcatgcttttattatgggatcatgaccaatgcgaactagatagttggccattggaaatgatgaaatgttatgcaatcatctcatgtaatgcgattggtacctttgaaaccttgtcatggatctaacttagtgtagttagtttacttttgctagaggacaaacaaagctnntaaattgggggagttggataactgctgtgcatagatata

SEQ ID NO: 34802 - DNA, 437 bp, Glycine max
tcctcgcggccatctgctgcgagaacaaacgtttggaaattagtttacaagataatgcttatcttaacgcaaaaatatcatactaatcactctgatttagaccaaactcatgtaatccatttatgcacacgcgcatgtgtagaaaatgtcctattactcatgtcaacatacaagaacattttccatacacctatatacattctgaacaagaaaacatactttcatgctcaaagtgttgcgtcaaactttacacctaatttatatcctaaacatttgctattacaaactacctacatacatttgaagtacaccataaaaaattttattgtttcactcatatttatttatatgcatattggaaagctaattacatcctgcacacactagcattcaaaaggaaattccatactatcatacattcatttacgaaaataact

SEQ ID NO: 34803 - DNA, 431 bp, Glycine max
agcttgacttgcccactttcatcaaccagtatattagcacacttgatatccttttaaaattcaataatttaattgaaataagttatatccttcagaagtaaaagtaactgtgtatgtaaattcaagacaaaaatcaaggaaccttgatctttcgagcatattgattgaacctggcaagtgcaccggatcgcgcaagtagtataaaacggtaagaaccgagtatcgaactctcagggaacttgtggtacttagtaaagctatatttagtgaataggtgtctagtatgaaaagatacgtgtggactatgaacaggtatgtaaactaattattaaaaaggaaaatcacgtgagaaatgatgtgtaaagacaagtagacaacgcgttggtcttcctattaggtggctgatgttataaggatattctctacttaat

SEQ ID NO: 34804 - DNA, 420 bp, Glycine max
  unsure at all n locations
ntctagctnttcattggtgtattttgatctccttttggtgctctaaattgtgggaatgtgctcaaatatgtggggcaattttggtttgttttcttgcttgattgggtcgaattgagggtttgtatgagatggccctaggcctataatgcattttgaagcaatgggatatgccacattgtcccagttctcttgctattaatgcctaaacgcgcgcccaccaagtgttcggtgaaatgcctcaatggcattagcgcgtggttttcgtagggaaacaacccatggggtgttttggtttgcacatattttctatttttttgggacatgcattcatttccgaaagggctagagtaattgccccacatatatcctangcctatgaaccaaagtttttatgcaaaagaacacaagagtgggtgctta

SEQ ID NO: 34805 - DNA, 433 bp, Glycine max
  unsure at all n locations
agcttcagtttcccgaagattagttcttccgaccagtaactccgcaacatttgttttcagtgtctccatcccacctttggatttgtgcttgcacattctaatgacaattcaattaatcaaagaaaagaaatagcagttggtaaaaggagttggattctaaaaacagacagaaattttttgtgatgacacaactgcaggcaaaataaaatttctgaccttatgcttttatcgtatctccatgcagtcacttatctagtaaaagattcatttcttattaatggtgaaaatgatacatcacactcaaaccatgtgaggctttttttgggatgtgaatggagccatgtctttgccttacttngtcaggagaatgggacctttagttcaatctagtgaggtgaaagtaattgtgatggattaccatggaatctctcta

SEQ ID NO: 34806 - DNA, 434 bp, Glycine max
  unsure at all n locations
tcttatcagatattntaagtagtgcagcctttgcctttgatgtaagaactgggcagtttcccttatttgctaaaacattccagatttatatattttttttggaattgtccatatttgtattttactcaagcttaaatgtacaggcagttgatcatccataccttgtggtatactctcaaagtgcagcatcaagaagtggagttatgacaaataatggcactgttgaacaagtttgtggcatttgccatgagccagttgaagatgttgtggtaagtttttttttttttttttactttttgttaaactgtttttctgattgaattgtttcaattattttcttcgttttcgatctagttatatgtttccgaaaacagttttttagctaattttagtgtgttaagtatctagtcattattgtttcaggttaccacctg

SEQ ID NO: 34807 - DNA, 401 bp, Glycine max
  unsure at all n locations
ggctgcagcttatattatattataccctgngctattatatatttttgggggttttgtatatattaaagtcttccaataggttgataatagattgtgttgaatcatgccttgtgctcttgctattgttattattatctgtacataactagntgtcgcatatttttttttttaaggttttatttggatatagaaaaaaccatatagagtgtctctgtgatctngtgtattcgtatatgtcataccccatttttgaccccgtttttaattctttttttctcgcttttaaccagaagttcgcattcaatgaatttcgcaggagatttaaatactattntgttcaaacgacgnnttttattattattatttatatttttttattattatttatttatattatatat

SEQ ID NO: 34808 - DNA, 437 bp, Glycine max
  unsure at all n locations
ntgaacaatatacttgtccttcattntactgtctttgggcttggcggccacgctcaacaaagtattttcgacacctactgtacgttgatttgaccaacgctgttatgggaatgttgcgacaatccttcaaaaccttattgatacattctgagaggttggttgtcatgtggccatatcgacatccttctctatcataagtcatcgtccatttttcttttgaaatgcgatcaatccatgttgctatggctggactcagttcacgaaatttttctagattttgataaaaaatgtgcttgcaaggagtgtangctgcataaaattagttatgaataacaagtttaagtatatatcanagttaaataaacgtgaccatgaaatatgaaatcttacccaatttcttcaacatttctttntgtttggcattattgaatttccga

SEQ ID NO: 34809 - DNA, 411 bp, Glycine max
agcttgtttgaccaaaactaacatacctcggaatcaaaaggctccttgccatacaaaggtatgggggaaagtcattatgtgcagccttacccttgcatatgcatagaggctgtttctggattcggacaaatcaaaacccatgaccgactgatcaccaaggcacaactttaccattgtgccagggcttgcccttttatgtcattttacattcattggctagtttaacaactaattatatcaaacacttttaataaaataaactaactttcagttaaaaattagcattagcttattacctaatcatttccaaacataaactaagcagaacactaaatcctccaaaatctaaaacaaacatatgcccttagcagcttagcctttggaaccaataaacacaatgtgatgaattat

SEQ ID NO: 34810 - DNA, 419 bp, Glycine max
  unsure at all n locations
tattaagtttcattgctattaaaaaacacaatttctttctcaacttattaagttttatgataaagcttcatccttattaaatgatttcaattttctttctctttttaaaatttccacaaatatcatcatcatcatcactttgatgattattatggtttgtaaatcttttatccacttaactttcaaaataatttaaaaatccatttcttaagaatttggtttctgcaaaaaattagtaatttcttctcacataacacggctgttaattatctattaacatttgacgtttatctcatttatttaatatatgttctagcataaccttctaacggtgatgctcttttgagagttcttccgaatgatggtgaaaggaactagtgaaatgtaccttcaaaagtactntgacagcatataagaat

SEQ ID NO: 34811 - DNA, 427 bp, Glycine max
  unsure at all n locations
tatcttgtgctaatcanatcactcctacatttcatctctagcatgcatattctttctttacccactcctcacgtttggttttttagggaaaaacaccataactaaacgcgccgcaagggatccctatcgcaccagatccaaatctagaacgatgggtgatcaagaggagacgcacgaacagatgaaagccgacatgtcggctctgaaggaacaaatggcctccatgatggaggccatgttaagtatgaagcagctcatagagaagaacgcggccaccgccgccgctgtcagttcggcttgcgaagcagacccgactctcttggcaactacgcaccatcctccctcanatatagtaggacggngaagggacacgctggggcacgatggcagccctcacctgggatacaaccgagcggcttacccttat

SEQ ID NO: 34812 - DNA, 418 bp, Glycine max
tcaacatcagaccacttccagggtgctggatctacttcacatggacttgatggggcctatgcaagttgaaagccttggaggaaagaggtatgcctatgttgttgtggatgatttctccagatttacctgcgtcaactttatcagagagaaatcagacacctttgaagtattcaaagagttgagtctaagacttcaaagagaaaaagactgtgtcatcaagagaattaggagtgaccatggcagacagtatgaatacagcaagcatactgtattatgcacatccgacggcctttctcatgacatctctgcagccatcacaccacaacacaatggcatagttgaaaggaaaaacaagacttttgcagaagctgctacggtcatgcttcatgccaaagaacttccctataatctctgggct

SEQ ID NO: 34813 - DNA, 420 bp, Glycine max
  unsure at all n locations
agctttctttttgatggcctcagctattctcttaggatttgtaactaacanatcatctacaagttgaatatcaactgaagcaagcaatgaagcccatgaaccccaatcatcttgatcaaacggatccttaattgacacaatgngaaattctttaacataattnttatatangtgaccaagactctgagtagagtgaacatgagctccatcattnggctgtttcatgaagttcanatcatacttcccatccttagtgtaaaactctgaagctgcaacatccataccaattntaatctgcaccattgttntttatttccagatcagcacaagtgaatattcanattatgcaacagaaataatcanaacttcacccaccttgccagtataaccagccttctcaatggcatccacgagtaaaac

SEQ ID NO: 34814 - DNA, 406 bp, Glycine max
tatgatatttgttaatgtcttcttactaattatggttatttgatctttgtattaatttcttttataataaactcacccctcgcaatttttgtactgtgtggttggtacctgtgatgatcgcgaacctttgttcgtggaagcagaatgacagcagtagagtatgagaagtgagattctttggtggagccaccaggctgacgtgatgaagttgggattattttgggagagagttgtgttttgttaatcaactcctccatagttggttccataattcttttgttgaattgaggatgcaaatcacaaatttaattatatgtatgaacaaatttactttccattatgtgaatgattgagttactatacctatatatatatatatatatatatatatatatatatatagata

SEQ ID NO: 34815 - DNA, 420 bp, Glycine max
  unsure at all n locations
tatcttgtaacatgagttntatagatatggtttatttatttggttttaatttaagactacatgtgtttgttagttactgtgtgcaatattgtattgacagtgtaaaagtttggtgttactcatttaataaaaatgtcattgttgtattcctaagtaaattcaactgatatttggatgcagtaatgcttatcagccatcaggtttcagttttatgttgaatgtatgtatacttcatgcaatgtttatatttagtgtcttaagaagatgtggtgtaagtcaagtttagtgtgactntgtattanatcctttcttgtggttaaatggtatgacagtgtaatggtgcaacttttaattctgagtcatgataatcaacttctgaggctattatctataacacattcatcaattgcatatgtgata

SEQ ID NO: 34816 - DNA, 403 bp, Glycine max
  unsure at all n locations
tgtattgcaatcttgttctgtttgttaaaattggtgtctaattnttatatttaattagttttgttgctctaatgatttttttttccaattaaactagtggagagacaagcacatgtctgtccacatttttattttttattatatattaaaaatttatatttacaaaaagatgtgaaaatgaggaggatatgacagactaaatagaaaaatgatagaacgaaattaaaatagtttatatgagttaataaataagtaaatatttgtaataatcaatataaagaatactagcaggcataaattaagaaaataaaaataatttatttcgtattctagcctaatccattacaatgtggaccaattaaaatacggatcacttgtaacanatcttaaacagcatgagctg

SEQ ID NO: 34817 - DNA, 417 bp, Glycine max
  unsure at all n locations
ttcttcttggttggaaagaataaggaacctatcaacattntacagtatgctgatgatactgtttttgttggagaggctgtgtgggacaacattcatgttattaaggccttattaagaggatatgaattagtttctgggttaaagattaattttgctaaaagtcagtttgggattattggtggtggtgtcaattgggctttggaagcagctaataccctgcactgccgacagctggagtatcctttcctctatttaggcatacctatntgggctaatcccttcagccagctggtgtgggagcctatcatcactagattcaagtcaaaattagccaaatgggctcagaaaatatatccatggctgggaagatactctgataattctgtctcaatgcctccaattatctctctcttttta

SEQ ID NO: 34818 - DNA, 417 bp, Glycine max
  unsure at all n locations
tatcacaattntntgcaaaattatcaacttcctaatttgaaccaaaattctcaaaatcctacttcattttatccttactttccatcaccaccaccaatgaattttatgcaaaataatcagaccccttgcactgaaaattctcaaacttttccttcaatgccacaaacacaattcttccatgtttcgtaaccctcccaatagttctagtgatccacaaactccttccaatgatgacgttgaaacgcaatttcaacaattttctactcaacttgggctagaaaacatcacattggaacgaggagagtattctacaaaaaaaatattgtgacttttctttnttttattgaagaggatacacatcttattggtttgtgacttaatgtctcaatggatccaattgttggtgatggtcaagca

SEQ ID NO: 34819 - DNA, 359 bp, Glycine max
  unsure at all n locations
agcttaggagatagaagtggattcaccactggagattgtggatcagctggcactggttcaacccgtgcaggtgtgggctcaggaggagcagcctcgttgggtctcaccaatggaggttgagctccaggccaagctacttgctcaagaaaatgctccataggtatgattggcctgtggtgagccaattctcacaggctgtgcatgataataaattgtgctcggaataagctttgtagcatagggactaaggtttgcgagctttggacatccggtcctatggttgctgacggaggagctggagtagatgatgaagggatgtcatctgctctagccctttntctcgataccatctgtaacta

SEQ ID NO: 34820 - DNA, 425 bp, Glycine max
  unsure at all n locations
tcatgatgatgaaccaagcaattntgatgatgccaaaagcccaaatgattaattcaagattgattcaagacttcaaaatcgagcatcaagaatccaatccaagattcaagattgaagagaagaaatcaagaagcaacaagtcaagacttcatataggataagtattaaaagattttttcaaattttctcaaattttctaagttaccagagtgattactctttggtaatcgattaacagttggcagtaatcgattactagtgaccagtttggttttcaaaatattttcaaatggtttgcaacgttccaaaatgattttcaaatagtggaatcgattacactatattagtaatcgattaccagtgaatctgaatggtggaattcctatcctattgtgaagagtcacaacttttcataaaatacattg

SEQ ID NO: 34821 - DNA, 416 bp, Glycine max
agcttgtccacaaaaataggttgttgaagtttgtcatttcaatttctcactaagtaaaatggatcattttcaaggtccaacgccttaaaatgatcacctcttaaagtaaaaaagaatcacttgataagaaagaactacgtaggtctgatttcctcaccgcaattgaggaatacgtaggagcaaagggaaacacccttgtcgaccacaaaaagagaaaaatataaaaagggtataaaggatataaagacataaaaaggggaacataaaaaatcaaagtcatgtttgcacattcgattaaaggctgccgtcccttgggacggacgtgtggtgtgctaataccttccctgtgcgtaaatacaactcccgaaccttttcacttaaaagttcgtagatcgcgtctcttcccggttttctga

SEQ ID NO: 34822 - DNA, 416 bp, Glycine max
  unsure at all n locations
tctcatgcattgctttaacccaattgtcatcttgcattgcatcattaatgtgtttgggttccatatcagaaattagtgcagtatacctttgtgttctaagcaatgatcttgtttgaacatgatctactagatcaccaataatttgactttctagatgatttcttctcatgatgcatctagtgggttcttttacttgttcttgaattcttgttgagtagatgcttgtgtttctagattttgtctggacgagctagttgctatagagacaaggagtgggtagttttattccttgggaacaaagaggatcgagcctcatcatcatcagatagtgagtccacaagcgacactcctatctctcctctccataaacgtgtttcctctacacaancatgcccaccattcatttagagagattc

SEQ ID NO: 34823 - DNA, 421 bp, Glycine max
agcttgataacaataactgcgtttctcttcatttagtgaacggtaaggaataaaacaagtactcaatcctggaaactaatttttctcagaagctatggtagatcaccattaagagaaccatgttccaccatcaaatttaaagttttccatacatttttcaaaagaaatattaagtgcatacacttttcaatctagtcctttgtcaccataaacccagtaaaatattacttccataatctccattaaagctaaaataatagttgataaacaccacattaagcaatcataaaaaccagcattcccacctccaatgctccaaccgttgaaaaatctcttcaaagctctccaaaattatgcacaacttcacagatcaaaaaatccaaaacaaggctaaattatgtaagtgtgaattatttataat

SEQ ID NO: 34824 - DNA, 399 bp, Glycine max
gttcctttgatttgctctgatagggtttctaagcattagagagaaggagaagagattaaagtcttcattttgtactatctttgtgcgattcacttttctctctccatgaatattatttcacaaatcccaacggtggcggtgtgaagaattgaattgccaaccaggtgcctaaatttcacaatgatccaacggttaactagtttgtatcgtacttttattggacaggtttcgagtctctacgggaaaagagaaagctacaatgcgaaggacatttctcttatctccaacatttttttttcacaatttccaacggtgagaatgctcataaatgagttgcgaacctgatgctgaaatatctcgatgatccaacagttaacaagttcgagattgtcaatttac

SEQ ID NO: 34825 - DNA, 407 bp, Glycine max
  unsure at all n locations
agcttatcggtccctctccgtcgcattcctcanaccagaccaccatccaccagctatcattccctcacattcactgttccttcttcacggcttcaatgctcatcatcgcagtgcgtacttctcttttttacttttcttattatgcttatcttatcttattcttccacctctttctcttctaggtttctttaccagggctaagccagcaaccaacattgaattcaacgatcgccacaggtctcttttatttttcatttaatgcttccgcaacgcaatcttttccatttccctgcccctgattcttttcctcaatgtattgtagtcagcgagctgttaaaactgccttgtggtgaactntcttgtttttcactcaagtttgagtatggtagcttctctatcatgtatgt

SEQ ID NO: 34826 - DNA, 275 bp, Glycine max
  unsure at all n locations
aaatggctgatacatacatgtgtgtctcattttcactcactttgatcgtgcttcttaacaaggtgtttcatatgtatattttancgcttgcagataaatnttcaatttcggctaaagcttccttcaatgcaataatgaggatgaggtggataataaacaaaatatgcgacatgtaacggagaacatggagtctatgcattgatttaacaccttgttgtaacttattcattaacttaaagtgagtattttcattttgtatgctgatacacgaatga

SEQ ID NO: 34827 - DNA, 313 bp, Glycine max
  unsure at all n locations
agcttgcagggcttgtgcttgccctccattatgagcatggaggagtttaacgcacaagtggcctggccaggagaccagccttcttcctctggagggggtggtgnctncacagcccacgagcctgtgactgaggagcccacaacaccaacaccatcaccaacagctacagagaaggagactactccagctcagaccccacaaccatctccaccatctgcacctgctcctgaggagacttagccatcagcattggatcttaatgaagaccagccacaggtggagcaggacgtttaaattttctgcactatgaaca

SEQ ID NO: 34828 - DNA, 402 bp, Glycine max
tatagcataaatctcaacacctagaaaatcgtcatcattcaaccagtcctctagtaaggagtatcctatctgcttcaactccagttcagttagctcttctaaagccacactttcttccctttaatcttctagagtctggtctatttcatcaaatccttcctcaccttggcttgcatctatcatttcagatggagtatgattggtcgaattagccaaaatgattgatttttctattatgactggtggatgcttactgaaagctggtccaatgcaatggctacttgactcattgagatttctccttttcccctagctttcatatttgcaatcattgcaagtttctgcttcattttgttcacagccatagcccgttgcaatcttctcttctgtgtgcgagttaat

SEQ ID NO: 34829 - DNA, 399 bp, Glycine max
  unsure at all n locations
agctnttgtcactccacccatatctggctntgatattaaccagacttaaaaccgctgacaacagcgtcaacaaattcttgcaccctggatacaaaggtttctttgaatcagtttgcaatgtatcatacatcggagcatgtgcttgctgaaaagactcttgtccaaggtcacgaatcatatcctccaagtgatctcccatttctacatcaaatggtttagattggaacccactctacatgtctgttaattcactatgccatatccatgctatataatttctcttaattgcatcacacaacaaatgttcccgtatgtcatcgactttttgccgtctcctgttcaaacaatttatgcatggacaaaaaaacttcccattntcattcggttaacttctttctg

SEQ ID NO: 34830 - DNA, 379 bp, Glycine max
  unsure at all n locations
atagatactcagcttttatccaggcacattcttggtggtgaagctccttcttccatggcttattccctagtggatggtgcctcccctctcctcttctcctttgccttccactgcatgtccatggtggaaaaccaccattgaaggacctcattgaagctcaaagatccagcctccatagaagatccacaagcaagcttccattaatacccttggggggtaggattgcatcatgatgtgactcctctagctttacacaaagctatgattaatgctggaaatccaagcctagaggagtcatgctgagctataatagagatctggtgaaagatgaggtaacccanattcatgtccatcttcataattattccatagattaact

SEQ ID NO: 34831 - DNA, 399 bp, Glycine max
  unsure at all n locations
agcttccattttctatgtcctttatctatagctcgtatccattagaaattatgtactttgatgtttggngacctgttccaataaattcaattgatgattttcgttattatttttgtggatcatttctccaagtatgtttggctctatccattgaaattaaaatctgatgtttcaataattttcccaatttttaaaaacttggtcgaaatacaattaaactcccaaatcaaaactctctactttgacaatggaggcgaatttattaaacttcaaccatttttacaaaatcatggcatctctcacatgacaaccccacctcatacccctgaacataatggtatttctaaacgtanacaccgtcacttagttgagactgttcgttgnctactacaccatgca

SEQ ID NO: 34832 - DNA, 380 bp, Glycine max
tcaagcacaacacactttggtgcttgtccaagaactacaccatcttttataatgatatcaaggtcactttaacgctctaaatgttttttttgttgatgaaaattttttatcttctatcttaaatttctatcaacataaaaggaagatggattctgatactggcctttaaataaattccccaattatacctcaccagccctagtgcatcacatgggtctcatgtacgcttctttttcactttcacgggctaagtacatgttcctccacatgacaaattctgtgtaaataagtatgacttatataaatgttaaccattacaagagacaatattagagcacttgtctaaataagaaactacttggcaagccatggcaatctaa

SEQ ID NO: 34833 - DNA, 404 bp, Glycine max
  unsure at all n locations
agcttttaactgaattagcaacgttccaaatgttttttaatggtgtaatcgataataatatattggtaatcgattaccagtgtatccgaacgttggaattcaaattcaattgtgaagagtcacatcttttcataaaatgcattgtgtaatcgattacatggttatggtaatcaattactagtgacaagttctgaataaaaagtcaagagatgtcactcttccaatggttttctcaagattttctcaaggttataactcttccaatggttttcttgaccagacatgaagagtctataaaagcaagaccttgactttgcattcaaataactttttacaacttttagaatctcttgaacaacttttgagaaatcttganacctttacaactcatctttcttcttctt

SEQ ID NO: 34834 - DNA, 432 bp, Glycine max
  unsure at all n locations
tgtctttggtttagataggatntatacatgatttaggacttgtaggatccaatttgggcaaaattggatgagggcaagagtgatttcgaaaatctgcactattatgcagaattttgctgttgaaatgtgcagcagaattttgtgcttgtgcagaaaatgcttatgcatggctggttgtggaaagggttgtacatattgggttcttgacgttntctaggagatcccaacggtcaaaatgtagacttatgtactagggacctccagtaaaatgttcgagtcgatccaatggtgattgaattggaacanagagaatgttactgggggtattgtgtanggaaangtgtggtattgggtttgtgttttgggcagagttttctgcttctgccccgtttttcttggattttgatagttcatgatgtgtggatgttgaat

SEQ ID NO: 34835 - DNA, 414 bp, Glycine max
  unsure at all n locations
agctttgtatttactgtacatcatctatctgatgagagatctcaactagccgatgtttaatagctgtgacgctctacactaggatgctactgtgcaaagagagtanggacaacaaacactttttgtagcatatcttcatagaaatataatttgtcaatgtcacataatgctcaaagttgactttcagcgtacaaatcgaaagaaacattaacattatagaacaaaaagaattgaaaatttcaagacaagataatttagatcttctcttttgtgtgctaaggcacaagatgtttactanacctatggacgctactctttaatgattgtttttagtacttgaggatcgagtaattattccattgcttttgtgttgcangtcaagtgctaaaacatttgtctttttaggatttgacg

SEQ ID NO: 34836 - DNA, 445 bp, Glycine max
  unsure at all n locations
tatgctcgtcaaaaattcacatggaattacgataacttgatattcattatataattggcgtatatctatacgctacaactccgatcagataactctttaaagcacacttgttccctatagacatacattaaattgataagatattctttattgataggaataaaaaaatatattatttaaaatttataataactcacctatcaatttatcatatttgcatatgtacattaattatagaccgtaaaacaccaagtatatatggcctaagaaaatgcttcatgtcatatattaaataaatcttttcatacctgaaaaatagatcattcttaaattactacctacgaattcattntttgtcaaatacctacttgaaaaaaaaatttaatccttcggntaagtgatgacgtgacagaataccacatcattacgtccaatcactgacact

SEQ ID NO: 34837 - DNA, 391 bp, Glycine max
  unsure at all n locations
agctntgtggatttggtcttcgccggcgaaaggatcgaagtgggtctaanaagaggaaaatctgatcatcctgctttgataaatgcaaaaaaaaaaaaaaaactgaggcaaataaagaggatgagaaggagggagaaacccatgctgtgatagccattcctatacggccaagtttcccaccaacccaacaatgtcattactcaaccaatagcaacccttctccttacccaccacccagttatccacaaaggccatccctaaatcaaccacaaaacccacctaccacacaactcanacgcaaacggtgcttatcgtggaggagttccggngcattccattgagcattgtatggccctgaagcataaggtgcanagtctaattgatgcgggat

SEQ ID NO: 34838 - DNA, 379 bp, Glycine max
  unsure at all n locations
ttggctggaggtggattctcttttagtcctcaaggcttttaatgttatcagtgtggctccttaggatttaagaaatgtctggatgaatactgtattctattgtggcccanatggagtttcgtgtctcccatattttccgagatagtaatgtatgcattgatcatttggctaactatggtgtaaaattgctctattatgtgggaagataaacttttgatttggatgaagtgtacaaggggagatacttggtgttgcaaggacagaaaaataaagataacatttgctatttggatggacaagcctttgagagaaaccatgataacaaagtgaagaagaaaatgaagttttctaatattgtagaagtgttgggagatacttc

SEQ ID NO: 34839 - DNA, 374 bp, Glycine max
agcttgcctcatagaggtccaggaaggacaaggcggccgaaggaactagttccgccccggagtacgacagtcaccgctttaggagcgttgtacatcagcagcgcttcgaagccatcaagggatggtcgtttctccgggagcgacgcgtccagctcagggacgacgagtatactgatttccaggaggaaatatggcgccggcggtgggcaccactggttactcccatggccaagtttgatccagaaatagtccttgagttttacgccaatgcttggccaacagaggaaggcgtgcgtgacatgaggtcctgggttatgggtcagtggatcccgttcgatgccgacgctatcagccagctcctgggatatccgatg

SEQ ID NO: 34840 - DNA, 233 bp, Glycine max
  unsure at all n locations
tgcacattactgctntatagaagaggagcaagatggtaatccgtggtaccatgacatcaagcggtacatagagtgtaaggagtatccacaaggggcttctggcaacgacaagaggatgttgcagaggttggaaactagtttctttctaagtgggggtatcatgatgtagctccattggagcttgttggccttggatcttcttcatcaatggagtcctttgcttcttgaatttt

SEQ ID NO: 34841 - DNA, 424 bp, Glycine max
agcttgtatataggagaccttcaatcctagaacgtaacgtggcagacaaaagtgggcagttaacttgaatgaccattattttcaatgcggaaagtattatgttcttcactatccatgttcacacattattgctgcttgtggttacgtgaacatgaattacttccaatatgtagatgttgtttacacaaatgagcacatcctaaaagcttattccgcgcaatggtggcctcttgtgaatgaagcggttattcctccttctgatgagcaatggacacttatccctgatccaagtacaattcgtgcgaaaggtcggtcaaaatcaacaaggataaggaatgagatggattggctggaaccatctgagcaccgacaaaaatgtagtatatgtggaagagaacgacacaacatacgtcgatgtccaatg

SEQ ID NO: 34842 - DNA, 389 bp, Glycine max
  unsure at all n locations
tgtaagaagtatagcaatataggagattgttcttggttgattgataaggacttagattntaatcatgggttaaggagttgtacaacagatggagatatattatacttagtgagggatgctttggaaaatgagaatgagataaacgtttattttcataatgaagtagatccaattttagaagaagattcacagatgttgtacttggaatgtcatccaattccagaagttgttgataatgaggatgatttagatgatgtacctattcctggccatgagtaagggaagttttaattcatctatacttggtccaacatggataccataattntgaataagtttggaatttaatgtttatgattaattcatataatttatttgtacttgatcac

SEQ ID NO: 34843 - DNA, 267 bp, Glycine max
  unsure at all n locations
agcttgtgctcttgcctcactcaccgnctttttggttgcatttctagctatcttatacttatcccaagtttcacaatttctacatctagaccactccttgaaacactccttttttactctaactttgctctgaacattttcattccaccaccacgattctttacccctaggtccaaaacctctagattcacccaacgtctctttagccactttaataatctgttatctcccaaattttgacatgcgcgtgaaaagttatgagcattc

SEQ ID NO: 34844 - DNA, 189 bp, Glycine max
tgatattgcacaacggaagcactcgagacatgcgaatgtgtcattactattcactcggatgtgcgattcgcgggcataactcatctagatgctcggaattgtgcatcggaagctctcgagaaagtcgaacggtcataacttttcacacggatgtgcgaattctgggcataatatatagagacgctcgat

SEQ ID NO: 34845 - DNA, 169 bp, Glycine max
  unsure at all n locations
cggctccatangacggaagaaatgtctggatgaatactgtattctatagcggcccaaatggagtttcgtgtctcccatattttccgagatagtaatgcatgcaccgatcatttggctaaccatggtgtagaattgctctattatgtgggaagataaactctgaatctgg

SEQ ID NO: 34846 - DNA, 400 bp, Glycine max
  unsure at all n locations
agctntgacccctttgccaaggcacccatatttgcactccttgtagaacccatccaagtagaacccaacttctctagtccaatggtcaaaagatgttagcatttgatgcccaagtaaaagtttccttccctcaaaccttatcaatctcattctttctcacaacaagttacatatggtaggaggaatcctaaaacaaatgtatatagcaaattagcactagcctatcccctaggtctgcatatgaatataactactgatataaagatgacatcggatcanacatgcctcagactacccatctgtaatgaagtcaaaaagaaaaatttcatgttttacttgaacaccaaaatgcctaacagagaacanaaggtccaattagtcaactatcctaaacactaaa

SEQ ID NO: 34847 - DNA, 378 bp, Glycine max
  unsure at all n locations
ntntcctattatggaaaattccgctttgttagctccgttaggattctaggatgtgtctcaatctagtatggctaatcattctccatgtatacttgttctccattctcctttaccatggcaagcctttgtgaaataacttcgatgaanagaaaaaggtcttggatcgagtggcctcaaaataattaagaagggggggttgaattaattattcataaacctttactaattaaaaattactcttttaaggcttttactaaattgctaagagaatgaggagtagaagagaaacttaacagaaagtaaaagcggaaattacatgcacagcagaaagtaaaagagtatggaagaaagagacaaacacacaagagtttttatact

SEQ ID NO: 34848 - DNA, 425 bp, Glycine max
  unsure at all n locations
agctntggttatngattgaccccaggcctaaaccagcaaccactccatcttgcactgcagtcctgtaagctttggttaaggattgattgtattgagctatagcttgactctcgcctgtaaatgatgcaacctgcattggaggaatgtgtatcttttatattctactgtctacaaacatgtaaaagaacaagattgacaagttccattatgaagattggcatacttgtcgaattgaatcaattgtgcgctctactacagttgctgcttcagaataagctgcttgtccatgggatggcaactttgcaaaagtaaagctcatcatggaaccagagattaccagaggtggaatacaagatagaaggacaagggttagaagccaacccttgatgaatgctatgactaaacgtcctaaaaaacatgccaca

SEQ ID NO: 34849 - DNA, 369 bp, Glycine max
tgtaattggccttgttgacacatgtgaggatcatgtggacctttgttttgtaattgtccatgtggatttgcatgaaatatagtatgtgattatcaatttggggaaatgggattaaggtttacgaagaatgaaattggttcttcttatttttgtttttgtggcagttaaaagttgccagtatctaaatattataaatggtgttaactttaaattgatttgaatcaatttaaatagataaaggattaaaatgaattttttaaaagataaataaataaattaaatctaaaaataaggtaaagaaaaaaaaactatatgacaattcttaatttaggttcccaacactaataaattaagagcatatttggattg

SEQ ID NO: 34850 - DNA, 386 bp, Glycine max
  unsure at all n locations
agcttgaaattgaacaacggaagctctcgagaaaatcgagtggtcataaattntcacacagatgtccgattcggggaaataatatatcgagacgcacgaaattgaacaacggaagctctcgagaaatttgaatggtcataacatttcactcggatgttcgatccggggacataatttatcgagacgctcgaaattgaacaaccgaagctctcgacaaattagaatggtcgtaacttttcacgcgaatgttcgattcggggacataactcatctagacgctcgaaattgaacaacggaagctctcgagaaattcgaatggtcataaagtttcacacggatggtcgatttcgggacataatatatcaagacaatcgaaattgaacaac

SEQ ID NO: 34851 - DNA, 377 bp, Glycine max
  unsure at all n locations
tgccgccacggagttntccgactatgctcttgtgtggtggatctagctacaaaaggagagagcaaganatgaagagccaatggttgatacatggacggagatgaaaaagatcatgaggaagcggtatgttccggctagttactcaagggacttgaaattcaagctccaaaaactaacccaaggcaacaagggggttgaggagtatttcaaggaaatggatgtgctcatgattcaagcaaatattgaagaagatgaggaggtaactatggctcgatttcttaatggtttgactaatgatatccgtgatatntgtgagctgcacgagtttgttgaaatggatgattngcttcacaaagcaatcccagtggagcaacaat

SEQ ID NO: 34852 - DNA, 413 bp, Glycine max
agaggacgtgagaagacatgctctatgatgcatcatgacacgtcctatagtaggctcttcagaatgcattgttatgcgtttatgatggttagaatagctgatcatgaataggccacgaaaatgatttgaataggtacaacctctataactactcgacaaccatcgtgagcgttacgacctctgatctccattcgaaacttactattggggagcgcatacccaaccattgtcatcgaccacaccaaacattgttgcgaaacgatgagactgtacacatattcctgcccggcaatttaagcatagaccagtcatatccttcgacaaactctgacacccttggaagtgatacatcgtttgatgattactcacacctatagttgtaatacaataacagatcatcgttatcgataact

SEQ ID NO: 34853 - DNA, 284 bp, Glycine max
actagtgacgctcttgagcatcttgtatattagcgagctctgtcactcttacgagttaaacagtatcgctggcacaatttgcactgaacttatatgttcaactgctagcgactccacctattacgggactgactctgacattagagtcacaagtaattgtagtgagaatttgctcatagcctatgaaatcaataacaagcatgggaagatcttacggtactgaatcgcacatacgagtcagaacttattgtcattggtaatttctatgagcttctgatttccat

SEQ ID NO: 34854 - DNA, 203 bp, Glycine max
agcttgtcgtctatctaaactaagcaagcagggctgcttcctccagaagcaacagactactggaggaatcgtctgtgaggcccaagtgggcatgattgctatttgcacccccatttttactaaatgcacccccttctattattttggtaattctttttccgtaacgataccaaacttgccgactttcgtaacgatacttattt

SEQ ID NO: 34855 - DNA, 327 bp, Glycine max
  unsure at all n locations
gagcttgngcatccctttggtatggcntttgatacgccagcggtgaccgtgctccacgcataatcttnccaccattctctatgagtgactatttcatgatacgcttaatcacgtacgatggatgccgtgccggtagaacacaacagctttactactttaatgctgactcggggggacacatcattatagacctatttatcatattacttacgcttatctgcttaatgtatggatctcgcaannannccaccaccnagcatacattactcttttctttgtcattattgacgagcattactatttctttgttaccacaccacaattagt

SEQ ID NO: 34856 - DNA, 466 bp, Glycine max
  unsure at all n locations
ntttaatcgatacattgcgttagctataccagactcaatcttttgccctatcttgtaacaccattgtaaattgtgcacacgacgatattttgctatatgatatctactcagcanagtggatttcacgcaatacataggtaagaggtggctgactctacaccgcgtgcgatcctgagcacctgcactgattagcgtgctacaaccgagatgcggacattctatcgttactcgctatgagagatgttcgatggaaagaaaacacgactcggagggtgcaacgctattacgacctgttgatcacggaatatgtggacgttgccacataaggacgatatataggagtggagaagtgattttggaaacgtattgcagtatgaatgccaagaaatactccattgagtccttactgatagggaaccctttaaagtggagagctcacatttgatgactagatgaacactgtcct

SEQ ID NO: 34857 - DNA, 495 bp, Glycine max
  unsure at all n locations
attattgatgacatcgntactacanggcgagttgatctcagctcgctgcgagccgatacagtaaanctgcctgcggcatgcagcattgttatggaagacagtgagaaaacaacaagtggagagtattgattcgcatgacttcagatcatgagcaataatatattgttaggaacaaaagccaaggacatactctgttatatatgatggcggacaagagcacctgcgtcatttggttaatgtgacgtctaaatgcgtcaaaactatatggattgaaccctcgcacttattttcatgtcatgatgagtgaatgcattcacttgagggctctatactgatctcagatgatacatacccgcatgtcctatgtcactcaatctatttaaatattggacgatcactgcctttcacatcgctgatgaagtgagcaacattatgcactaggctagatgctgaccacgggaaggctaagacattcgttcacaatacagcaccacg

SEQ ID NO: 34858 - DNA, 375 bp, Glycine max
  unsure at all n locations
tgtcatcggcgcggttgacacatgtgatgatgcatgggaccttggcttgtaattgagatagcagaatatgatgagccaatggttgatacatggacggagatgaaaaagatcatgaggaagcggtatgttccggctagttactcaagggacttgaaattcaagctccaaaaactaacccgaggcaacaagggggttgaggagtatttcaaggaaatggatgtgctcatgattcaagcaaatattgaagatgatgatgatgtaactatggctcgatttcttaatggntcgactaatgatatccgagatattgatgagctgcatgagtttgttgaaatggatgatctgcttcacaaagcaatccaagtggagcaacaa

SEQ ID NO: 34859 - DNA, 196 bp, Glycine max
atacaatacacaagctagccgccacggagtttgccgactatgctcttgcgtggtggatcttgcttctaattgagagagcacgacatgaagagccaatgagtgatacatggactgacaagaactagatcatgaggaaccggtatgtatcggatagttactcaagggacttgaaatttaagctcctaaaactaaccca

SEQ ID NO: 34860 - DNA, 418 bp, Glycine max
  unsure at all n locations
agcttccatctatgaagaaattcaagaggatgttcaaagagattcaaaggatgtaaaagattgtaattaatgtcttttaaatgcaagttatggtcttgcttttatagactcttcatgtctggtcaagaaaatcattagaagagttataacctttagaaaaacttgaaaaccattggaagtgttacatcttttgatttttattcaaaacttatcattggtaatcgattaccaaatcattgtaatcgattacacaaagcatttttgtgaaaggatgtgactcttcacattttcatgtctggtcaataaaatcattagaagagttataacctttagaaaaacttgaaaaccattggaagtgtacatcttttgattttattcaaacttatattggaatcgataccnatcattgaatcgatac

SEQ ID NO: 34861 - DNA, 398 bp, Glycine max
  unsure at all n locations
gttggtgcatagaagaagaagaagttcagagagattcaaagcttgtaaaggattgatcaaatgaatgtgaaaagtatattgaaaatcaaatcaaagccttacttttatagactcttcatgtctggccaagaagaccatttagaagagttataacttttagaataacttaaaaccaatttgaaaaagtcaaaaaccttttgaagagttacatattttttatttattcagagacaaacactggtaatcgattaccatattagtgtaatcgattacacagagcttttgtgtgaaaagatgtgactcttcatatttgaatttgaaattcaacgttcaaaggcactggtaatcgattaccaaaacattggaattgattacagctntgtgaaaataattggaac

SEQ ID NO: 34862 - DNA, 415 bp, Glycine max
  unsure at all n locations
agcttgccgtctagctcgcctaggcaagcaaggttgcttcctccagaagcaacagccttctggaggaatcttttggagggcccaagtgggcatgattgctatttgcacccccatttttactaaatgcacccccttctatttttttggtaattctttttccgtaacgttacgaaacttcacgactttcgtaacgatacttatttccttccgcaaggttacgaatccttacggattatgtattttctcttttttagcttttgaagaagttacggaaacttacggattgcgcaaaaacacctcttttcgacttccgccacattacggaattacacggatcgcgcaagcctgcttcctttagatttctgagacgtctcgggacttcatttattgtgcaacanaggacgccaagtatctc

SEQ ID NO: 34863 - DNA, 426 bp, Glycine max
  unsure at all n locations
tctggtgactgggaagcacgttattctgttgttttccagaatcgtttccttcgccaagtatgtgtatatgtgtattatattcgntgntctggttgttgtttgtattacgttntgtgcagaagaaaaaagaagaagtagagatgagagtcgtcatcacggaaagggcaggacggacgaaatcagtgntctatctttgctttcctcttatcatagatgagaggtaagtaaagaggggcaactgtcataccctaatttcgtccggngattattacttgatgacatgcaacctttggttagccgctttgagatacttggcgtccttttgtgcacgataaatgaagtcccgagacgtctcagaaatctaaaggaagcaagcttgcgcgatccatganattccgtaatgtggcggaaattgaaaagaggtgt

SEQ ID NO: 34864 - DNA, 410 bp, Glycine max
agctttcgtcttgttacagctaaagggttaataatgttaatcatgcacaatgaaagctacgttagaaaagctagttgaattattatttcatgaaacgcttcagcatgtacatggctgctgtgccagtaaaatacaacaactttacgactttaaagttgtaactgaagcacacctaattaaagacctatataaacatattaattaccttatctgtttaatgttttgatctaataattagctcaacacagatcaaacatagtcctcccctttgtcattcttgacgatctttcccttcccattattattcccacaaacaaagtctaggttataaagaatcggtaacattgccacagaagacaagaaaaccaacacaggcccaaagatccaaagcagaagagggagtgctgagt

SEQ ID NO: 34865 - DNA, 440 bp, Glycine max
  unsure at all n locations
tgtgatgacgacataagttcaagtcaggaatatatatatatatatatatatatatagcatgttgagagacaaatgtggngaaaagttaggctggttcttgaagaatccatgccatatggatgctacagagtgaaagggacttgttttagtgtagagagatgaagaaagttctacgttaatttggaatatgatttggtgtttggaaggagaaccgtaaaagagggtgcaagagttttccaacgtgttccagaggcttcatgtgttactttgtcaacatattggtcatattcatcggactacagcttttctctttaagtaatggtttgggcaatttcacactaagttgggattaagtccaatatcaataccatacctactagntacgttntcggctattgcttcctgcacctcttttatggtttctggaatggtcaatcccg

SEQ ID NO: 34866 - DNA, 393 bp, Glycine max
  unsure at all n locations
agcttctctctctaactctcactctcacttagagaaggggggaacactaataggcacgcatgctttgcattggtgaaaacggataacaaaggattacttctttgtgtattacccatgtaaaaaagtcaactttttgatgatacattcatccaaaatttcattgacaatttcctccaactacgtcagcaacaaacataggaaattttttgttgacaaatccgtccacagatgccacgcagaacattccatttgctttgacagagatatttaatgtttggactaaattgtcgcactttccttaaatccaaggacaattnttttttttatcttttcagtactatagtgttaactcattacaaattcanggattgaagtgactaatttatacttaat

SEQ ID NO: 34867 - DNA, 395 bp, Glycine max
atttggagtagatacatgggaccaactcattttatttcataaaagaaatcatatctagtcaaggtctgagagaccatacaagtttcctaacgatttctaattatgtgggccattaagtctatcatatgctgacaatagccgagaagcccatgaatctcttcgggggcggagtaggtgtctgccatcgccttggccttagctaacaatcggagaaggtcttgactcccgctcaaggtaagagcaaaccgatccatccacatggttgcctcttggtgtaaagagtcgatcacccttactctagcctctttttccgcatatacttgggcatactcatacgcgattctatgctcgtgggccgtggctagacccaactcttcttggtacttggcgatgat

SEQ ID NO: 34868 - DNA, 384 bp, Glycine max
  unsure at all n locations
agctttcaatgtacaaacaattagtatatacaactcttatagagacagacacaatacagcagtcacaggcattgaactactccattgtgattgcatggatcatgagtatataagtatcatcacatattcacataaatctcatttatgattacttattatgcacatacctgtcttccatccaagcaacactgtacagatcacccaagcaggttgaatattctgggggaggactaggatactccccagggcaatatgttccccaactactttcttctgcattggaagctgtggttgcataaatattgatatcttcgggaagaagaccttcaaagatactcccagattcacatgcctncagataaaatacctgcattaccatcatgt

SEQ ID NO: 34869 - DNA, 420 bp, Glycine max
  unsure at all n locations
ntgcggngtgagcttacccgcatgtctggctctagtcacggtcgacatctcccactttcatatcttttgcttcgtagccatgacccacatcttccaaccatcaccacctccaattggtagccatgactaatatatttccaccatcaatatctttgtttagtaaaagtgttatgggatgggttacgataagtgtgcttgtgtccttaccctgngtttgtaaacttatccctaaccaaattaatacccaacaatacaggggacaagattgggtggactagactntgtagtattatatatatatatataatattntataaactattcttttaagtattgattaattaacanaattgtgtcacattatataaggaaaaaatattatatataaatatttattaataacataaacactatgtaata

SEQ ID NO: 34870 - DNA, 448 bp, Glycine max
  unsure at all n locations
tagtaagaagatttcctagtttatcactaacatattactatttgtgttaaccaatctatatacaccattgctaacttagaaattggtctgaaaatcagcttcctagaagttataaatattttaaaattaaaaaaaatggtataatcatataaatatgaactaaaaaaacatattgtctccattttgaaataattatagataaatgttaacaacacactattacttgatgaatttcctacaacttttaataacaataataaaaaaaagagctggcctaagctttctagtggaactcaagaaattcacctattaataaagagcttgatgaacagtgtgcatganagaatggttatcatataagatttcactgaaggattaagaacaatcaatgaatactatcagttntaaagaaaacattactgaagtagtagtccattgaactatatta

SEQ ID NO: 34871 - DNA, 361 bp, Glycine max
agcttttgatgcactagttcgaaggtatgtatcaacctggtcttgaaaatcaagatctcatgagccctttcaagaatggatgataaatgataattctgaattgggaaacataatattgcatatcatgactacgtgaatggcttcccatggccaccaagatcatacacttgcagcttttgtacaaaggagtttaagtctgctcatgcacttggtggacacatgaatgttcataggacggatagaccaaggttgaggcagtcatcaccctcaattcatgaagatcaaggacaagctgctggacctatatagcacaaccttaatcttgaccctaacaacaactcactctcatgatgatgggtgc

SEQ ID NO: 34872 - DNA, 370 bp, Glycine max
  unsure at all n locations
tgtgatagtcataatgtagaccttctctagaaggaggttccttttactcagggagcgtttttgcgaacaacttatatgtacatagtgaataagtacttatcatataagcactaacgtataagctatgttataagttattcagccagatatctgagatgagatgaatgtggcttatggacacatcataagctaattttataagttctctcaaacacttacagaagtgcctgtgttataagttcaaataggctatcaataagcattttccaatgcatattataatttgacctttnttgagtggatcaattacaggaaggccagctccactgtggaggaggttgctagaacatgaatcataactatgcttaaa

SEQ ID NO: 34873 - DNA, 262 bp, Glycine max
agcttaacaatgttctgtcgtcgagagtcagacgaggcgtctacctcactcttgacggtctttatactatccacgtactattctgtttgatcacactgcatccttctaacagctaaaatgtgacctcacttcatgtgtgctttatatacattgcccaacgctccttacgcaatgcaatactgtgtggtaaagtgattgcgagcttcgattatgtctccatacacaactctcccattgaagtaccaacatgaaaatggatatg

SEQ ID NO: 34874 - DNA, 316 bp, Glycine max
tgatggctagtgtaaacatctactatacatacaaggcaggattgatatcgcacgtgacgctactggaggaacactcatatgttgaggtgtgcatagcaggcattacattcgttgctatggatgtatgtactcctggactacgttatagctgggagacatacagcttttcacccacccttccaccattcaaaacgctgtttagagtattttctacacctgagtttagtataactatatatacttgaataccacacccatttatagagcgttctttagagcctgcatgatgatgtatattatcagttacgaaagatga

SEQ ID NO: 34875 - DNA, 418 bp, Glycine max
  unsure at all n locations
caagacttattccctagtggatggcgcctcctctccctttntctnctttatcttctgctacaactctatgggtgaaaatcaccatttgaggaccttagtgaagctcaaagatccagcctcagtagaagcttctcaagcaagcttccatcangaatgtgaagtgatacttacaagaaagcaaantacaganggccttgtgggtgatgagtaatgganggtgtagtaaaagatgtaagtgatgataaggaagtgtangagagcgagaagtggctaaaaataaagagaaaaaaaaatgagtgggtgaaatgtagaanananaaatgagaaaagccaagaaaaagagaaatagttntaaagagagagttgatgaggtcttagcttttangactagagtcaaataacgagagaagcaaagagg

SEQ ID NO: 34876 - DNA, 412 bp, Glycine max
  unsure at all n locations
gacactataaatactcagcttattaagaggcttcctcaagaagcttcctcgtggcttctttgtataagctttctcaagaggcttctttgataagttagatccttatctagccacacctctctattaactaaattaacctccttaaaaataattacagataaaaataacgcaacaaataatcaaacatcaaacataattactaataatatatagatatatatcagggtgttacaaaccacatttcagtagcgtcacttttgcatcctgcacccaccaatatacttgcacatccacaccattttggataatttgaaaantttcctttcgtgaatctgttacgaattatgaatgtataaaatcgttacgaatttgtcattggtatgcgtcaatataatttttttttggttatttc

SEQ ID NO: 34877 - DNA, 422 bp, Glycine max
  unsure at all n locations
agcttttggtgggacacatgtcaacacctcctanaaaaaactctctccataacttctttataatttttcttcaaatttatattaaatattttttgtgtaatattatattatgatagatttatataattactaataaaccattaaaaataattataatttatttaactaatttttttactttaaaattctacaaaattatttttatttagaaatcatataaaaataattgtaaacagctccataaataaatattttgttggtaaatatttatattatatggnttatatttttatactaaaaattagtttaaatatagttaatattttataataatttgactctatgtttagaatttttttattaaatatattttaaataaaataaaaataattttgtggctataatcaaatatattntatctg

SEQ ID NO: 34878 - DNA, 423 bp, Glycine max
  unsure at all n locations
tgaaagctaggcaattgagttagagttggtaattnttttctacacaaaaacaggttataatgtccatttatatcatgtcagtaggtcctttccagatttttttgctgaagcattatccctttgctagatatctatgagacatatatctgggttgttatcaatgcatagtagttcttttaatatatatatatatatatatataattggaattgagcctaaccaactccctttcagggggccccagggactgggaagactcagaccatacttgggattctaagtaccattttgcatgctactcctacaagaatgcattcaaagtaagtgtaatatttttatatattnttgtagncttctatgtctaanaacttcgtaccccattgcccagaggctcttcgctatgcgaacgtatgggggagggat

SEQ ID NO: 34879 - DNA, 419 bp, Glycine max
  unsure at all n locations
agcttcatgtagatgaaccaagcaattntgatgatgccaaaagcctaagtgattgattcaagacttcaagatcaagcatcaagaatcaaatccaagattcaagcattcaagagaagaaatcaagaagcaataagtcaagacttcatatatgataagtattaaaagagattttcaaaaaccaaatagcacagttttgttttacaaaagaattttctcaaattctctaaagttaccagagtgattattctctggtaatcgattaccagtgaccagtttagttttcagaatattttcaaatgggttgcaactttccaaataattgtcacatagtgttatagattacactatattaggtatcgattacaagtgaatctgaacgttggaatgtatatccaagtgtgaagagtcacaacttttca

SEQ ID NO: 34880 - DNA, 427 bp, Glycine max
tcaaacctctcacaaaggagaagacaaagtaaagaatgtgaaatctaaactgatgaatgcaatacaacagtcgcaaatagaaatagttgttttctccaaaagctatactgaatctactttgtgtcttgaggagcttgaaaaaatcattgaatgcaataaattttaaggccaagtacttgtgcccatattttatgatgttgacccatcagatgtacgccatcagaagggtgcttttggaagagcattaaaagaacttgcacaaaacaaatattcaagagaccatgcggcataagtgtttgtgatgtggagccacacactcagcaaaactacagacttttggtgttgggatgcaagagagcaatgttgttagactcgtgattctacgtagaatcgtgaagacttcgtaaactcgacttcgagaatcgaa

SEQ ID NO: 34881 - DNA, 426 bp, Glycine max
agctttatatattatgaggagcaggccacataatattttggtgtgtatgatgtatatatactacatacacaacgtgtacagtggaaatcatacaagtgctgagattctgatcagaaagagaatagtttgttagaatacttgggaaactgaaccttagctctactcagaaaggggaaatcctttgtgaataggaaaccctttgaaggataatctcaactttgtttctttgcaattcaagaaatactatcaaagcatatttgttccctttcattcccttagcattatgctattctgctactaactttaactgcatttaaagcttgctcataactaacaaagtttatttgtttagattgattcattgagagcccttcaatcatcaaagctcattcccatgatctttcgttaccacttcaacaaccattt

SEQ ID NO: 34882 - DNA, 326 bp, Glycine max
  unsure at all n locations
tggttcgaggtacttacccgttgaagatcgaagaacgatgaagaacgaatgaagaacgtcgaagaacggtcgaaaccttcacgaaattcttcacggaaaacgttacggaaacgtttcggaagcgcctcggcttagatttttttcacggaaacaatttttccaagcaaattcgaaagagagagaagtgccaaaggggctgaaccccttccttcttcacttcctcccctatttatagcaaaataagggaggtggttgccgcccagctcgcccaggcgagccangttgcttcctccagaagcaacagccttctggaggaatcttctgga

SEQ ID NO: 34883 - DNA, 476 bp, Glycine max
  unsure at all n locations
tgtgatgcctcgttancttacctatactatanaatactcaagctatatgcgtgataacaggcgcactcatgggccttggatgttaatctctcgtgcgtgagaggttgtgtgatgagctagatacgtacatagccacaccgctctaataactaaagcaacctccttgaaagctaatacacaggatgataacgcgacccataacctacagcagacataactactaatgagatagtgatatatatccgggtgttacaaaccgaacttcactagcgtgacttttgcattctgcacccaccgatatacttgctcatacacaccattttggataatttgaataatttaccttcgcgaatctcggaccaaatatgaatgtgtaaaaaccgcacgaagttgtcatttgcatgcgcccacataacatgtttgtcggtaactctactacattgagcgcgcatatatacaaactgagctcatgtgcg

SEQ ID NO: 34884 - DNA, 483 bp, Glycine max
tgttgtacctcatgcctacatatacataaataccagacgtcaactggtcgcgaggagcatgcgaacccaacaggtttttattcatatgtatgaaccagacccacgggttggcggttagagctcctgtgttgacacaccatacagacctttgtccttccatgcaggagagcgtgcaaaagaacagactgcaacttatgtctgaggcatgtacctttgaccacctttaactaatgagaacaatcaaacacagtccagctattatgacctttccagcagaagatacaaccctggatggaggaatcaccctaacctcacatggtccagccctcagcaacaacagcagcagcctgctctcttcttacaaaacgctgcttgccgaagcggagcatacaatccttggccgatcaaacaacagcaacaaccccagagacagtcatcagctgacgccgctccacaaacttccctcgaagaacttgtgaagcg

SEQ ID NO: 34885 - DNA, 414 bp, Glycine max
  unsure at all n locations
agcttgaaggcaaactggatgcgttggtcaacttggtaacccagctggccttgaatcagaaatctgtacctgtcgcaagggtttgtggtttgtgctcctctgctgaccaccatacagacctttgcccttccatgcagcaacctggagcaattgagcaacctgaagcttatgctgcaaatatttacaatagacctcctcaacctcagcagcaaaatcaaccacagcagagcaattatgacctttccagcaacagatacaaccctggatggaggaatcaccctaacctcagatggtccagccctcagcaacaacaacagcagcctgcttcttccttccaaaatgctgctggcccaagcagaccatacattcctncaccaatccaacaacagcaacaacccaagaaacaaccaacag

SEQ ID NO: 34886 - DNA, 416 bp, Glycine max
  unsure at all n locations
tgccacccaactcgcccaggcgagcaaggtggcttcctccagaagcaaccgtcttctggaggaatcttctggagggcccaagtgggtctggttgctatttgcacccccatttttactaaatacaccccaactttttttttgtgcttcttttttcgtaaagttacggaaacttatgaatttcgtaacgatacttgtttttttttttccgtaatgttacggaaccttgcggatttcataatcantccctttttgacttacggaacgttacggaacctcacgaattctgcaacgatgcttcctttttgattttcggtatgtcacggaaccttacggattgtgcatcaatactttcttttgatttccgacatgtcccggaacttcacanaatgcctaatgatgggtgccaagcaccacac

SEQ ID NO: 34887 - DNA, 423 bp, Glycine max
  unsure at all n locations
agctttgaattgtgttgtttttcaccttctcgctaagccaatccgctggcttagcgagcgttcgctaagcgcaacactcattggctaagcgcaaggaagaatctggaagaaaatgagctgtacaagttcgcttagcacactgtttcgtctcactaagcgcaccgcttcagtccatcagctaagcgagaaaggcacgcgctaagccgaaattcactaatgtgcgctaagcggtccagaattgcgctaagtgcacgagcacgaacaaggccacctatttaagcttgagatcagattttgtgaagggagtttgggctaggattcagagctttgcatgtctagagattctagagagagaaaggtccaatttcagagagttntaagagatgtttgtgtgtgaagatctgcagagactatagctcgaag

SEQ ID NO: 34888 - DNA, 400 bp, Glycine max
  unsure at all n locations
ngaaggcaaactggacgttggtcaacttggtaacccagctggtcttgaatcagaaatctgtacctgtcgcaagggtttgtggtttgtgctcctctgctgaccaccatacagacctttgcccttccatgcagcaacctggagcaattgagcagcctgaagcttatgctgcaaatatttacaatagacctcctcaacctcagcagcaaaatcaaccacagtagagcaattatgacctttccagcaacagatacaaccctggatggaggaatcaccctaacctcagatggtccagccctcagcaacaacaacagcagcctgctccttcctttcaaaatgctgctggcccaagcagaccatacanttcctcaccaatccaacaacagcaacaaccccagaaaca

SEQ ID NO: 34889 - DNA, 381 bp, Glycine max
  unsure at all n locations
cctaagcagccaagtgaggcacaacagaacaattatgacctttgcagcaacaagtacaatcccatgtggaggaatcattccaaccttagatggatgaaaccttcacaacagcttctgcaataacaacaacatccatacttgcataatgttgctgggccaagcagaccatacgtttctgcaccaaatcaacaacagcagcaaccccagaaactacgaacagtcgaggctcctacacaaccttctcttagagaacttgtgaggcaaatgattatgcataacatggcagttcaacaagacaccagagcctncattcagagcttaactaatcagatgggacaattggctacacaattagatcaacaacagtgccagaattctgac

SEQ ID NO: 34890 - DNA, 154 bp, Glycine max
tcactgatagtagtattgatgtagctatcatcaaggaattctatgtcttcctctacgacccataagacaagtcacctaatcaggtgacggttagaggtcatttgatcaaatttgatgaaaatactttgaacacattcctgaagacccttgtaat

SEQ ID NO: 34891 - DNA, 410 bp, Glycine max
  unsure at all n locations
agctntntattttcagtagatgaagatgaatctgtggccacctcatggactcctctaaggacaatagcatcatttcttgcactgaattgttgggagttagaagccatcttctcgatcaaattcctggcctcagcaggggtcatatcactaagggctccaccactggcagcatcaatcatactcctctccatgttgctaagtccctcatagaaatattgaagaaaaagttgctcanaaatctggtggtgaggacagcttgcacacgatttcttgaatctttcccagtactcatacaagctctctccactaagttgtctgatgcctaaaatgtcttttctgatggcaatggccctagatacaggaaagaatttctccaagaacactctcttaaggtcatcccagctgaaaat

SEQ ID NO: 34892 - DNA, 426 bp, Glycine max
taagatattaaggatctgagcaatttcgaatagattcatcaaggtaaggggggtctatcaaattcttgaaccctaaccttgttgtctttggaaactaagtttcattgaatgttgttttgatgatcaaaattcgtagctaattccttggatggaactgtattatatgttgtgtttcttgaaattctaaggttaaaaatgagttccttgggtgtcaaaacttaagtttagctttaaatttctctaaaatcggagttttctagtaaaagttatgaacaaaacaagtttaaggaattttatttatttttttagactaaaactgtcatgaaaataaagttggtgttatggctgtacggactgttttttctttaaggttgacttcaaaatgagttcttaagtgtgaaatatagtgagcatataaaattatga

SEQ ID NO: 34893 - DNA, 391 bp, Glycine max
  unsure at all n locations
agcttggtgtgtcataaagggcatagatcattattaattagaatttgcctcttggccaggttgtccttagtaggaagtctatcccataacaacctccagacaaaggatcccatatcagccactatatgatttctttgagaggaaattgagtacaaatctggaaattgatctttgagtggaattccatcctcagcccaggcatcttcccagaacaaaatttgatcacccctacccatcttccagcagaattgtttagagacggcagtcatattgtgatcttgattgagtgcctttaggtcagcccaccaggtggagaaatgttgnttgtgaggcccctgatccaatcctctccagccctgatatttagaaatcaggatcctattccacagct

SEQ ID NO: 34894 - DNA, 371 bp, Glycine max
  unsure at all n locations
tgcttgtggngcttctatggaggctggatctttgagcttcaatgatgtcctttaatggtgattttccaccatggagatgcagcggaagaaaaaggagaagaggtgagaggaggcgccatccactatggaataagccatggaagaaagagcttcaccaccaagatgagccttggataagaagcttggacaggatgcttcaatggaggaaaagaaagaggtagagaaagagagagggggagcacgaaattgaaggaagataaagggagagaagttgaactttgagttgtgtctcacaagactctcattcatcanagttacaacaagtgttacacatgcttctatntatagactangtagcttccttgagaagc

SEQ ID NO: 34895 - DNA, 375 bp, Glycine max
  unsure at all n locations
agcttactattattattagactaatacaaaaattacaaaattatgggacaatgttaataattaatgttacactttaagcattacaggagctagtaggtcattagttttacacttgggccatagccagtcattaatgttatagttggaccttattggaccttgggaaaccatggttgttatacttaaacattatttggccttagttaattattggtgttaaactttaacctaattgagcctaacttaattattagtgtaacaatgagctntgttgggcattaaatagtctttaactttataatttagcctagtagggtctttgacaatcattagtgttacactngggtttaattggacattggtcaatcatcatca

SEQ ID NO: 34896 - DNA, 307 bp, Glycine max
  unsure at all n locations
ttntactntattatttaactataactttcataataattatttgtaaattatacttanggngaattctaaatagctattagtggaaataagaaaacatcgatgacatatgaaaatcatacctcattacacaatttcacagaattgttagtatgttttttttttggattttcaaggttatgatttatttagaatgtttatattaagagatagacatttcttatcaaacattaattttcattatgagagagaaccttgataaaactagtcttctcatctggagggtcacgaatcgacactatgaaagtag

SEQ ID NO: 34897 - DNA, 420 bp, Glycine max
  unsure at all n locations
agcttctctacagtcttcatcaaatgctaacacaacatccttgtttagtaaattgctaagtggtttggcaatctttgaaatgtcttttatgaatcgcctataaaacccagcatgtcctagaaagcttctcactcctttgacatttactggaggagggagtttctcaatgacatcaatctttgctttgtctacctcaattcccctcacaaaaattgtatgccccaacacaatgccttcttgaaccataaaatgacatttctcccagttaagcaccaagttggactcttcacatctctgcaacaccctttccaaattcgatagatagcaatcaaaagaagagccanagatagagaaatcatccataagaatttcgatacacttctccaccatatcgaanaagatngccatcatgcacctctg

SEQ ID NO: 34898 - DNA, 235 bp, Glycine max
tttcaaagttagtgagaaagctaaacgaaaaattatggaacttaaaaaaactaaatccttaattggggcgtatgtgacaatcataatgaattactaaacaagattgggagtttacttaaggtcattccagatactcctcaaactcagaaaatacttccaaaatggtaacaacaagtaccctccaattaattaatggtattaatgaagatagtgaccaaaactcatataacacaac

SEQ ID NO: 34899 - DNA, 411 bp, Glycine max
  unsure at all n locations
agctttgtgtgattggtcttcgccggcgaaaggatcgaagtgggtctaanaagaggaaaatctgatcatcctgctttgataaatgcaaaaaaaaaaaaaaaactgaggcaaataaagaggatgagaaggagggagaaacccatgctgtgatagccattcctatacggccaagtttcccaccaacccaacaatgtcattactcaaccaatagcaacccttctccttacccaccacccagttatccacaaaggccatccctaaatcaaccacaaaacccacctaccacacaactcagacgcaaacggtgcttatcgtggaggagttccggagcattccattgagcattgtatggccctgaagcataaggtgcaaagtctaattgatgcgggatggctacaaattgaggagaat

SEQ ID NO: 34900 - DNA, 308 bp, Glycine max
  unsure at all n locations
gtggctggaggtggattctctnttagtcctcaaggcttttaatgttatcagtgtggctccttaggatttaagaaatgtctggatgaatactgtattctattgtggcccaaatggagtttcgtgtctcccatattttccgagatagtaatgtatgcattgatcattaggctaactatggtgtagaattgctctattatgtgggaagataaactttgaatttggatgaggtgtacaaggggagatacttggtgttgcaaggacagaaaaataaagataacatttgctatttgaatggacaagccttgaag

SEQ ID NO: 34901 - DNA, 181 bp, Glycine max
  unsure at all n locations
ttaagagagatactcattctgaataccggncattccttgtttagttctcaagtcangtaataccatgtttagcttgtaggagtctctattttaattgggtaccatgtgatcgtgatcgattacttccttcttgaaagagttcgtaggaacgagcaagagccctttattccattgaaatcac

SEQ ID NO: 34902 - DNA, 275 bp, Glycine max
agcttgtctctatatggcatagatcaccattaataaaaagttgcctcctggccaggatgtacttcattggacgtacatgccactaccgcctgcagacacaggatcgcctattaaccactctatgattgctttgagacgaaattgaccactaatccggaaattgacctttgagtggaatatcatgctcagaccacgcatgttgccagaacaaaactcgatcacccctacccatcttccagcagaagtgcctaaagacagcagttatattgtgatcc

SEQ ID NO: 34903 - DNA, 60 bp, Glycine max
tctatctttgttttaacgcatcatttcaaagattcgatgatatttttgcatggtaaattt

SEQ ID NO: 34904 - DNA, 423 bp, Glycine max
  unsure at all n locations
agcttcggattgtaagtattggattggatagctcgtgcttccaagctacaaataaatttgaacccaaatatgatactcctcgttttttatataaaattcaattacttaatttatcaaattcaaaaaaaaattaattgatatcaataaatttattttacatttataacttttttttaaattttccttatcaataatatttcatctcttctaatagtttattaatatattttgtttcttattttaatgagagatgtttttagtataaaaataattaatacaaaaaatattataaattgagttttataaaaaaaaataaacatcaattcaaatttgagtcttatagataagaacaaagggagcaatgctaaaagaanaatgttaaagtcacaatctntttatgcacactccttattggttcacatc

SEQ ID NO: 34905 - DNA, 441 bp, Glycine max
  unsure at all n locations
taccttgaagaagaattgtagggcacgacaactttggaaagggaaactccgtggcttgcacagtggcgcgacaagacgagacgccggatgcgcgataatggactacgcccttcgtccgaggtcacgacaaggtcacaacatattgaaatttcagacaaacagggaagtgggagctcgagctagggcgaggttggagtgttcatgaattagcacgcaaaagcttataaacctcaatgttaacgacggtgggtcaagaaaaacgtcattgacattcaaaatttctacgacgttgttttcaaatacaccgtcttaacttacctgttgcgtaacctacatagacgggttacccaatgaacatcgttgaatgtgtcacgcgccgtgcacatggcacataanaagggcacatatttatagaaatgccaccgctaattctactacgac

SEQ ID NO: 34906 - DNA, 410 bp, Glycine max
agcttgccatggtagtcgtggacctgaaggcccgactgaaggagtcagagtccaggatggaggattccgagttatgggcatccaatgagagggaggctaactatgagtttgaataggagttgctagtatacaagaaggaggttgtcgagtagcatgaaaaagggttgcacaatgctgttatgcatgccgggatcttcgtcaaggaccttgtcttggctctttgtaaccctttctagcacgtgaatgatggtgttctacttatcaaggaagatataactgctgatgaggagacgagcatggagtaagatgttggggccaatgtttacgccgatgtttaatttcttgtttgctggattttaggcacaatggctatgtaattatgaaaattcttcgttcgagaatgaatttcc

SEQ ID NO: 34907 - DNA, 421 bp, Glycine max
  unsure at all n locations
tagtaagttatgtacctgtgttccttgaggatgtgcttagtttaccacctaagtgtgagattgagaatctagtaggtctagtacccatagaaaactgtaaccgtagagatatttggtatatagctgtagagcgtatacaatagttgggaaagttgtaaggagtagttatagtatgaaacctttagaaagtgtaaggtcgatattaaggcgttgttttgctgagcataaagggattcgagagtgagtattcttatgtaaggtagatgacctanaggattagcgatgatagttgtatgattagtgagatagatcttagttctctttacctttaatccgggtaaagtctgaggatgctctgatgactatcatagtaccttccatggactatacgtgtacctggtcatgtcttgacatgatcgat

SEQ ID NO: 34908 - DNA, 407 bp, Glycine max
  unsure at all n locations
agcttcttgcacgagatcaatatatttattagcatatattaaaggatgaagacgtggtacgtgatatcttttggtgtcaccctgatacagtgaagttagtcaatgcatgtaatttggtattnttgatagacagtacctacaaaacaaatagatacaaactctcactacttgactttgntggtgtgacaccaacagggatgacattctctgctggctttgcttatctagagggtgaacatgttaataatgtggtatgggatttaaaacggttccgaggtatatttttaagatgtgatgccctccctagagttattatgactaacanagacctagtattgatgaatgcagtgaanactgtattccctaagtgtacaaatttgttgtgcagctttcacataaacaagaat

SEQ ID NO: 34909 - DNA, 393 bp, Glycine max
  unsure at all n locations
ntgaagttagtgtattttattattagtattattatacatataattaaatacttttatgggtatgattttctattgataattcatgtctatgattttgtagtgttattatgacatgatctcgaaagttattgatatgttgaaattagaaaatatttttatttaatttgatacatgtgtatatgattcatgagatatgataaattattatattgngatcatgaaattgtgattgagaatgtgtgtgtaagtgatgaattgtgagatatatgtgtattgagatgtgagctatgaactctacaatcacacaattgtaagagcctttaagagcgatgagttaatgcgcgataagnnttgtatgagctctactgtgggaacccgatgaagttaatcaat

SEQ ID NO: 34910 - DNA, 424 bp, Glycine max
agcttctggaggaagcctcttaatgaagcttttagagaaaatacatgcagctccctcggtaaacacgctgcccagcctttgttaaccattggatcttctcgaaatttggtttgcgacttcacaagacacttgtccatgatctgaccgttgctatctttgagaagatgtctggagtgtgctagaagcttccgttcccgagagcatctcttatttaagcatttcagcctttgctttcgtgtagcttaagaaaaacgtcatttcttcttctttctttcttccaaatccatttctaaagttccaagaactttctccatcacccacagccaccattagccaccacataccatcgttggtctccacaccgagaggaacccttcaaccgaagcagaatcttccaacttggcttggcggttcggtagagaac

SEQ ID NO: 34911 - DNA, 428 bp, Glycine max
  unsure at all n locations
agcttgcttctacaatctccccctttttgatgatgacaaccctgaaatcaagaaacacggcacacactttttcctagtcgatctctcacttaattctccatattctccccctttgtttttgagtttatgcttcatttgaaattaagttaatcacttatgtgagttcttgatttaatccctatttctgtccccctttggcatcaacaaaaaagccaaagtgcgtaataagtaaaaaatgtacatacactactaatcatacacaagacattcattaaaaagtataaaccaatcatgaagcaagaaacatgaatagatcaaatatataaaaaaaatatagtcatataacataattcataattgttcaatcataccatgcaaataanagaaatactanattgttcanatgtcataataatatagattattta

SEQ ID NO: 34912 - DNA, 472 bp, Glycine max
  unsure at all n locations
ntgtacctcattacggacctatgaatactaagcttgactgaaacgcantggcttagtgtgtggggaaccgattatggaaatggaaacaccactagaggttcggttggcacaagcgttgggcatgggccaccaggacatggataggtggactatacatgatggaaggaattttatggataagtgcacactttataactatttttagaccatcattaatgaccatattaactaatggatggataattgtattaaccttggaaaaaatgtgacaattgatgaacctggtgtctttatcattaatgaatgtatgaacctaatggctttgacagcttatgcgtatgtagattttaaggganggtatttcaaaattttcatagaaataagaactaccatgatcaaataagtgggcaataaggttacataatctacgacatatagaagtcaaaaacatggtgcacagaagtgccaaaag

SEQ ID NO: 34913 - DNA, 209 bp, Glycine max
agctttgagacaattcaaacgaccataaccttttactcggatctctaattgaggcccgtaacatatcgagatgctcgaaattgaatgtggaatctctgagcccattcaaacgaccataagtttgtactccgatgtctgattgagtccccggacatatcgagacgctcgaaagtgaatgttgaagctctgagccaattcaaacgacaata

SEQ ID NO: 34914 - DNA, 232 bp, Glycine max
tcaacattcaatgtcaagcgtctcgatatattatgggactcaatcagacatccgagtaaaaagttattgtcgtttgaattggctcggagcttcaacattcaatttcgagggtctcgatatattacgggactcaatccgacatccgagaaaaaaattattgtcgtttgaattggctcagaggctcaacattcaattttgagcgtctcgatatgttacgggactcaatcagaca

SEQ ID NO: 34915 - DNA, 354 bp, Glycine max
  unsure at all n locations
agctntagcatatcgtatcatatggtttccttcttcaattgccttgagttgcttcatttctggattaaatccggcgatctgccgtgaggtccaagttctgcaaccagtttcgttgagtcaggaagtagcatatgctaggttgcacgaagaaaagcagaacgatgcatgaaggacatttcgaccttcgtcagttgtaggagcttcctcaagctctcgaccatcgctattacccactccatccaccaaccccccactgttaccaacaccggcacaaacagcttcttccagcattccattcaagagactaactccagaagaattggccttatggcaagaaaagggactatggtttca

SEQ ID NO: 34916 - DNA, 329 bp, Glycine max
gtcactatctaatactcaagctgagatactgtcaacttgaagctagcttagcttagccttgtcctgcttatcggagcagatctgccttagatgcaagggatgggtgctaagcgcttgagactcgcaacttagcgcatgaatagagatgagcttagcgcgaggcttgtgcttagcgaaaggactatttttcagataaaaaatctctaagttattcttcagccctttttccttgaaattgaaacccttatgttaagcattcaaagattggctgatatactcctatgtacatattatataacaagttccacatgatttacatgcataaaaag

SEQ ID NO: 34917 - DNA, 394 bp, Glycine max
agcttgtaacatgagctgaagcataagaaagattcttcttataagttagatgctgcggcgaagcttgattgcttgattgaaacccatgactgaaactcatttgactgtcagactggaaagggctccctcctgatggagtagatgcttccaaatacaaaacttgattgaattggagcaggttgcatacctgtgtggaggtacaggctgctgctgccggagtgaatgaaatgcgtagttgatgcactggaggttaattaaaacattgaatgagaactggcagaagcaacagacgcagtggatgacgatgatgtactaaatgtggaaccaaatgcacacttggcgggctgcctactaaagtagaacttggaccacattggagctaacacattatacc

SEQ ID NO: 34918 - DNA, 441 bp, Glycine max
  unsure at all n locations
cacgaggcctttctttgggtttgtgaacatccctgtttgccttcttcttcacggcagttgggttattcctcagatgcctattggactcaataaaatcttccaattggatgtacctttaggccttaaccccgattttgggccaaggcagagggcggcttttcgcaaaggctattaatgaaaaagtttggttgtaatgttgtaaccaaatggtgcctaactaccaccgagtcaagatttagaatatccaaggctgccttcccaaacctttccatgaaagaccgcactgtttccttcttttcttgttgctaacttactaaggagaccaacaccatgtgatgttgactagttgcaaactgaagcccaaacctcatgggctcaaaacagtntatggatcctcgtggagtccagtgaaccaactcacagctgtttctttgagtgatn

SEQ ID NO: 34919 - DNA, 427 bp, Glycine max
  unsure at all n locations
agcttgcttctacagataacacatacacggttactctaaccaaattgacttttgaggttgatttgtgtttgtgtttcatgctgtcaatttccaggttgtccttgtaatataatagtttgtgaattggagtttgtgtttatagcaagagaatggatgagtcaacaaacaggcataatgataatttgggtgtgaacaaaatggggaaaaacattaggaagaccaaaagagaccagcccaattatggcatgaacaacaacagcaacatgaatgggggtagacagcaacagcaacacaaacagcctcagctttacaacatatccaaaaatgatttcaaggatattggtcagcagaaaaaaaaagttgattacgatcactcctaattntaacaaacataaattatttatatttcaatattaacacatgtatg

SEQ ID NO: 34920 - DNA, 440 bp, Glycine max
tgccccaaccttgggaatgagctatagaaataaccaatataactccctctagttcagctgaaaagaaagaaagatacccacatataaaatatatcctcctaagaaagcaccagagtcatcatgagataacctaccatatataagggaaccctgaaatgattttactagccttacgtgcatgaatattgatgttaaaagctttgatgacctgaaactcactcaaagaggatctcatacagcttaaagtaagataaccagccccaagcaaaatatgagcaaacataatgatcattgcttgctgctatgagacaaaaagattatgaaagtaggcttgattgtggcaatattagattgcccaaaccacaaagataaaaccagcaagaacaacatctttagcatgcgggcgaacaactgccaacatccaggataagatcaatagg

SEQ ID NO: 34921 - DNA, 263 bp, Glycine max
agcttcatgctgctcaattgctccacgttgctgcatggaaaggcaaaggtctgtatggtggtcagcagaggagcacaaaccacaaacccttgcgacagggacagatttctgattcaaggccagctgggttaccaagttaaccaatgcatccagatttccttcaagcttcttaaattcagatgatgcagatggggttgtagctacctcatgcactactctaatgactatggcatcagttatggcgctaaactgctgggagttgg

SEQ ID NO: 34922 - DNA, 320 bp, Glycine max
agcttgcctgttgtgttttgagtactgtaatagggtgtttttacagttcctttgaaaaaaccttgaaaatgagatgttgtaaaagttatctttttataaaattgatgttattttcctgaccttcgttgaaccccgatcacattggcgcgatcggaattttaaaatgacatctccttgtagtagaatctgaaacactcctcagtcctttatgttttgacaggggtaattgatcctaaatgttgttattaaccttattttttaaatatatactaaatttccttcaatttggtatataaaaccttgcgtttggattgacaaac

SEQ ID NO: 34923 - DNA, 246 bp, Glycine max
  unsure at all n locations
tataagaacaaaatttcctcaatcatatccaaatacgcatgctaattangaagcatcaacaagaatcaagccaaggctattgtgcangcaatcaatgggggcaaaacacaccaaatgattatgatgatggatggctcaaattctcacacaggtaaactcatcacttttaaattgagctttcaaaactatcatgacatgtagaggagaatcaaggatttcaagtcacaacatgtcaaaaacttttat

SEQ ID NO: 34924 - DNA, 382 bp, Glycine max
  unsure at all n locations
agcttccagtagtttgagaataagcaaaaacctcaatccccaacatatataaccttctctttctgctgggttgtgcctcttcctgctatgcgtcttcttgctgcataacacctcttcctcttcctcttcgatcatcaccacttcacaatgtcgtcgaagttcgacccctcccattgacgtcttcatccgcataaccgatggcgaggttagtgcgacgagttccctcccagagcgtgagaatgaagagaagggttgagagtcttgatccgtcgagcgtgaagatgagcataagaagagaaatgagtgaggttttagggttgattcanaataacatcattctcgagcgtgacaatnttttttaacgtacacaacccatttcagc

SEQ ID NO: 34925 - DNA, 388 bp, Glycine max
  unsure at all n locations
nntaaatttgaattaaaacattcagaaactgctggtaatcgattaccatatatgtgtaatcgattacatagtgcaaattttgaattcagattttaatagctgttattaatcagttttggccactggtaatcgattacatcctctggtaatcgattaccagagagtaaatttcttgaaaaagactttttaacttaaatttcttggccaaaccttttgctacttcaattggaattcccttcctattaaatataccctttctaagactctagagactatcctgatcatccatcttgaatatctttaattcctttgtcttgaataaagctttgagacgcatgtgaacctttggcatcatcaaaacattcagcttgatcctttgtctacatat

SEQ ID NO: 34926 - DNA, 418 bp, Glycine max
  unsure at all n locations
tgcttcaggatttgaaagtgagacatttcctcaacatgttttcaaactcaaaaaagccctatatggacttaagcaagctcctagagcttggtatgaaaagctaagttcatttctcttgaaaatggctttgagcgaggaaaggttgacacaacactcattcacaaaaactatgattctcagtttttattagtgcaagtatatgtggatgatatctcatttttagtgctactaatgaaattctttgtgaagatttttctaagtagatgcagactgaattcgaaatgagcatgatgggagagctgaaattctttcttggattacaaataaaacaaacacccanaggcatctacattcatcagaccaagtatgtgaaagaattactgaanaattcaacatgggtgtcgcaatatagataaag

SEQ ID NO: 34927 - DNA, 431 bp, Glycine max
  unsure at all n locations
tatcctgtaactaccaagaaccatctggtaatcgattacagcctgttgtaatcgattacaaggtcctgttctatggtattttgcatttaaaactaactatttttcactcacaaaacctacacattgagtataacaatcattaacaacaatcaacaatcaaaatatacaattaaaacaagcatcaaaactctcaaacacattcatcaagcacaatcaaaattgcaaaagacaattatcaacaacaatcaacactcatcataactatcaaaacataatcattagagacaatcaaaactcaaacaaagacaatcattaatccataatcaacaataatcatcaaaagcaaactcaattatcaagaacaatagaacanattaacaatcatatgataagagataataatcaaccaagttaactatgtatctaagtca

SEQ ID NO: 34928 - DNA, 340 bp, Glycine max
  unsure at all n locations
agcttgatcaaaacaattatctaatcattccaatccactcaaatcatatagttgctcattcaaatcattctcaaacactcatttcatacaaaacaatccactgcatatcaatttcaaccaattcactgttcaaacacgctttttgtacaagcaaacaactcagagtactgaaatttaaataacttgaaatttaaagaattgaaacatacaaattgaaatttaaatgactgaacataaatcataaaataacttanataaactaaaatgttcaaaatgcacaaatttaaatgtccttctcctgtggttgcttctttgcatgctcattaagatacaacatctg

SEQ ID NO: 34929 - DNA, 322 bp, Glycine max
ctgcggttgatttacggatagcctctgtggataactgggcggtgggtaaggaggaggattgttattggctgagtaatgacattgctgggttggcgggaaactcggccgtataggaatggcagtcacagcatgggtttctccctctttatcaccctcttcatttgccccagctttctcagtcgtcctaacacgatgatgaaatttgcctctgttcggacctacatcgatgctttcactggcgaagaccaaattcgccaagcttttgagggtgcatagcccaccatcttttcatagtagagtaccgataatgtgtctaccatca

SEQ ID NO: 34930 - DNA, 338 bp, Glycine max
  unsure at all n locations
agcttganattgaacaacggaagctctcgagaaaatcgagtggtcataaattttcacacagatgtccgattcggggaaataatatatcgagacgcacgaaattgaacaacggaagctctcgagaaatttgaatggtcataacatttcactcggatgttcgattcggggacataatctatcgagacgctcgaaattgaacaaccgaagctctcgacaaattagaatggtcgtaacttttcacgcgaatgttcgattcggggacataactcatctagacgctcgaaatngaacaacnggagctctcgagaaatttgaatggtcataagttttcacacgga

SEQ ID NO: 34931 - DNA, 392 bp, Glycine max
  unsure at all n locations
taacaatggggagatggaccattcaagtgctggaaagaatcattgacaatgcttacaaagttgagctgcccggtgagtataatgttagttccaccttcatgtcttgattacctcttttgatgcagatgtagaatccgatntgaggacaaatccttctcaagagggagagaatgatgaggacatgaccaagagcaagggcaaggatccacttgaaggacttggaggacctatgacaagggctagagcaaggaaagccaatgaagctcttcaacaagtgctgtccatactatttgaatacaagcccaagattcaaggagaaaagtccaagggtgtgagttgtatcatggcccaaatggatgaggactaaatgacaccactttgtctcnaatttt

SEQ ID NO: 34932 - DNA, 428 bp, Glycine max
  unsure at all n locations
agcttgaatgataacttgatgccttggtcaacctaccaactcagcttgccatgaatcagaaatctacacctgttgcaagagtctgtggtatatgttcttctgcagatcaccatacagatctatgtccttctttgcagcaatctggagtcaatgagcaacctanagcttatgctgcaaacatttataatagacctcctcagcagcaaaaccaacaacagtagaataattatgacctttcaagcaatagatacaatccaggttggaggaatcatccaaatctgagatggacaagtcctccacaacaacaatagcctgtccctcattttcagaatgttgctggtccaagcaagccatatgttcctcctccaatacagcagcagtcacaacanagacaacaagcaatttcaaccttccttagaagagttagt

SEQ ID NO: 34933 - DNA, 431 bp, Glycine max
  unsure at all n locations
taacctaagtaagtaagtaagtgaccaatgtaccatggagaaatccctgatcttcatgaagtgccactccttgattcanattaactgcgagccgggaagagttgtccacgtcgttgggttgaatggaagaacaaggaagatgggctagggttcaatttgtaacgaagagggtctagggttcaagttgtacgagctcgaggtttcaaatgactaagctagggttcaaattgtaacgataaagggcttcaatgcaaggtgggagctgaggctctgctattcgaacacgtgtttgtatttttccccaattacgacggtctttaacttanacctgccacanactntattgcatgtaacattctaanggcggttttaataaccgtcttggaatgtgcatcgtanaatgtaattntttttacaattattacaaaaat

SEQ ID NO: 34934 - DNA, 422 bp, Glycine max
  unsure at all n locations
agcttggcactatcaacactataaggcanattcccaaaataaagcttggtggcagaggaatcagagtcttgttctgccaccgcttctccttcattctcctccactttctcttcttcaactaaaccagcaccatcatcatccacaacaacaacagcctcttcttgtgcaacagcagcagaaattctaggtccccacaacttgtgcgaattaatggacaaaggttccaccaagtgtgacccaaacatgccacggtttgagggcactgttgttatgagagggtctattatggagcagttcttggaggaacgaagacatttgacactgttaatagaagaagaaaacaaggaagctatgcctgcagcagcagtggcagccatgttgttgttgtgatgtaatgcaactcanaagtgtacattacaagt

SEQ ID NO: 34935 - DNA, 192 bp, Glycine max
  unsure at all n locations
cttgcgcgatttattcttttgttctttcttgtgaaatttcttttgtaaatctttgtatagatactaagctctcaaaatacctcgtaaatcttcagagaanaagactaaagtattgagtgatatatatttatatgtaagacgatcatgtattagtcatggtgtanactttcaatgaatcttggtatttttttt

SEQ ID NO: 34936 - DNA, 389 bp, Glycine max
agcttggagttgttcttaatggatgaagagaatgagggagataacgagagaggtgggagcacaactatgatggaagcacaatggagataagctgaactctaagttgtgtctcacaagactctcattcatccaagttacaataagtgttacacatgcttctatttatagactaagtagcttccttgagaagacttcttgagaaaacttccttgagaagcttctttgagataactttcttgagaagctagagcttatctacacacacccatctaataactaagctcacctccttgataagctagagattaactacacacacccctctaataactatgctcacctccttgagaagagaagctagagcttagctacccacccctataatagct

SEQ ID NO: 34937 - DNA, 255 bp, Glycine max
  unsure at all n locations
gacactatacaagctcatgtgactgtgtgcaaccacaaatcttacattgagtatcctctttgatatgttctacaatagaatttgcatgaatttctaattgtcataacatattattcatggatacgatctaggcattccttctttctttacattttaagccattgaccagacaactatcccaacgtatattattttataatttgtaagccctttgagccaaacacttgatatttttggaacactaacctangataa

SEQ ID NO: 34938 - DNA, 74 bp, Glycine max
ttgtagaggttaacgaaacaacgagatgatgcgctccatgacatgctgtgtcagatggataatcgagaccatat

SEQ ID NO: 34939 - DNA, 377 bp, Glycine max
cgtgatgacgacataagttcaagtcaggaatatatatatatattatatatatatagcatgtcgagagacaaatgtggggaaaagttatgctgtgtcttgaagaatccatgccatatggatgctacagagtgaaagggacttgttttagtgtagagagatgaagaaagctctacgttaatttggaatatgatttggtgtttggaaggagaaccgtaaaagagggtgcaagagtttttcaacgtgttccagaggcttcatgtgttactttgtcaacatattggtcatattcatcggactacagcttttctctttaagtaatgttttgggcaatttcacactaagttgggattaagtccaatatcaataccatacctact

SEQ ID NO: 34940 - DNA, 397 bp, Glycine max
agcttatataaacaaaattgccttaatcattcccaaatatgcatgtgaattaagacgcatcaacaataatcaagccaaggctattgtgcgagcaatcgatggggcagaacacaccaaatgattataatgatggatggctcatattctcacagaggtataatcatcactctcaaattgagctttcaaaactatcatgacatgtagagaagaatcaaggatttcaagtcacacaatgtcaagaacttttattttcaaaacaattacccatttcttgaacatatactataattcacagaacaacatgcaaagtcgtacgtgcacactaaaatgacccatagtattagactgaatatgcgacgaatctaacaacattaacagattaacacaactaacaaat

SEQ ID NO: 34941 - DNA, 380 bp, Glycine max
  unsure at all n locations
tcgaanagtgtcgcattgcaccttcttgctaagccaatctactgtcttatcgagcgtncgttaagcgcaacactcatgcgctaagcgtgaggaagactctggaagaagatgagctgtacagggtcgctaagctcagcgcttcatctcactaagtgcaccgcttcagtccatccactaagcgagatagacacgcgcaaagacaaaattcactaatgtgccctgagcggttcataattgcgctcagctcatgagcacgaacaaggccacttatttaagcctgaaatcagattttataaagagagttcggactgggattcagagcgttgcatgtctagagattctagagagagacaagtccaagttctagagaggtctgagag

SEQ ID NO: 34942 - DNA, 414 bp, Glycine max
  unsure at all n locations
agcttacatagccctaatcttanactgattctaacaacataaaaaccctaaaaatctaaagctacaattaaagtattctacccttgagttaagacaagaaaaggagaanaaggatcaaggaacttacttggatggtgtatgattgatgcttcaaagtcaaaaatgcacaaagagcgtacagatgcaaaatgtgcaaatttttggagagagagaatgcagaggcgaggtatctgtaatctggaaaatgtgagtgtaactgctgttccactcacttaagcagattttcgataccttcgcttagcgaaccgttgcgctaagcgagcaagatagacgtttggtttctcaaccaagctcgcttagcgagcatgtgcgcttagtcgacgtttcaaattcgaaaacaattttttattttta

SEQ ID NO: 34943 - DNA, 428 bp, Glycine max
tcaggctattcaattgctccagattgctgcatagaagggaaatggtttgtatggtggtcaccagaggagcataaaccacagagtcttgcgacaggtacaaatttttgattcatggctagttaggataccaggttaaccaaggcgtctagtttaacttcaagcttcttagtttcagatgatgcagatgagtttgtggctacctcatgcactcctctaatgactatagcctcatttatggcgctaaactgttgggagtcggaagccatcttctcaattaaattcctggcttcagcaagggtcatgtctccaagggctccaccactggcagcatctatcatacttctctccatgttactgagtccttgataaaaatattggagaagaagctgctcagaaatctggtggtgagggcaactggcacatagttt

SEQ ID NO: 34944 - DNA, 423 bp, Glycine max
agctttctctctttataatatgttgtcactggcattccataccgccacaatattattatcatgagtgatcatacctctagaaaacggccatgtgagttatgaatcattgggagtagttattagagacccctagatactatcctataggtccctaaaataggggcacggagcgaacacgctgcgtgccgttttaaacactgccatgcatgtagtcctaaatgtcatatacgcctttgcttgtaattatttatggatattgtcgtactctgtgcatccccctgttgcgcttttgcgcatctgcatcatgccatcaaacatgcattgtgtgtgggtctcgtctttttcgcgggaaagtgaaagatccatatcgtcttcttaactgcacacatggtgcactgcacccccaaatgcgccagtaggaga

SEQ ID NO: 34945 - DNA, 226 bp, Glycine max
  unsure at all n locations
tgtagaattcaccccaattccagtgtcctatgctgacttgctcccatatctacttgataattcaatggtagccataaccctagccaaggttcatcaacctccatttctccgagaatacgactcgaacgcaacgtgtgcttgtcacggagaagccccggngcgttccattgagcatggtagggctctgaagcgtaaggtgcaaggtctaattgatgccggctggctg

SEQ ID NO: 34946 - DNA, 403 bp, Glycine max
  unsure at all n locations
agcttttcgattcattctatgtgcccgtagtggtccacattgtgtttcgtgcatttttattctcattntgtttactttttataccccctgttgacatgcttaagccattttacttaagtcatttctcgcttaacttaaaaatagaataaatttccaccgaacgtttgaattgtattatccattaacttcggtcaaaataaattccgaccgttcggttgtgccgtaaccacgttggaaatcaaaaagaggtaaaaaataatataaataatcaaaaaatatctttttagtaaaataaagcggaaaatcaatcggacgttntctctttgggattcctcattcttaatcgaattgattaataactaaagtgaaactaaggctaaaatcaactcgcctagtcaagctc

SEQ ID NO: 34947 - DNA, 385 bp, Glycine max
  unsure at all n locations
gtggaaatgatttctatacaaaagttagtcgtataaagcgactaacactaccattcctacatgggcaaattntccaccagctccataatatcaatactcagccaatatcagcccttctcattacccaccaccctatcaaccaagaacacccaatcatccacaaaggccacccctaaatccctatataccaaacaccacgcgaaacactaaccaatgaaggaagtttctaactaagaagcctgtagaattcaccccaagttcggtgtcatatgctaacttactcccatatctactcaataaatggtaggcatacccgcagccaaggatactcaaccttcatcttctgaggatgcaactcagacacaacatgcgcttatcatggagg

SEQ ID NO: 34948 - DNA, 335 bp, Glycine max
  unsure at all n locations
atcttggtgagtgggtcttgggcctgctgatcatgtgtgggctggctctgtattttgagcaatcaatgtaaaggtgcttagtttgctcatgaaacacgagattggccgctatgtggagaatgctttgattatcacaatatataacaactggatgggagcaattgatattaaatcattgagaagataggtgagccattgaaactcacacgtggttgaagtaagagctcagtatttagcttctaatgataaatgtgaaacaatatcctatttcattgatttctatganaccaaggatctgccaatgatgaagcaatttctgtgatggagttggacag

SEQ ID NO: 34949 - DNA, 365 bp, Glycine max
  unsure at all n locations
ntggacgcgtttaaaggttttaatgctaaagtagagaaacaatgtggaaaataaattaagattgtgagattagatagagaggagagtattatggtaagtacacagagagtggacaagcacctggtccatttgcaaaatttctttaagaacatgggattgttgcccagtacactatgtctagttctccaaattagaataatgtggcagaaagaagaaattgaactttaatggacatggtaagaagtatgaggagtaacacaaaacttcctcagttcttgtggattgaaacacttaagatgattgtgtatatatttaatagagttccaaccaagggtgtctcaaagacaccttttgagttattcaaa

SEQ ID NO: 34950 - DNA, 426 bp, Glycine max
  unsure at all n locations
agcttgtaatgtttgttgccagcagcattgaaggattcaatgaattcaacattgttttcgaatatcaggaaacgtttttcatctcagcagaatccttgtatactttaccatatttttccatccactgctcatgtctttcgtagatggatgcatcatggagtttgcgggactttacttgggaagtgcaaattgagagaaggagaagtagagctaaaactttcaggtttttgccaatggaaatcatctctttgttagcaattaatgacactacgtactgattaattgttgctagagaaactctattgagtttagtgtttggagctagatgtgtaaattggtatgctcctaaggcaatgtttcgattagtatatataggattattgtccctttaaggggannatatttaatcttagtcagaatgaaact

SEQ ID NO: 34951 - DNA, 440 bp, Glycine max
  unsure at all n locations
tacctggtcatggattggcatgagttgtaaggaaagatccatagccaattgtcaatattcttaatgtgataataatgtacagtatccatttgggtatagttatcttaaagtagaagttctaaccatgattaaaagaacatcaccgaagataattagcattacagtgtgcagaataggataaataatagttacttttgctccggaatatataatttgttggtccctaaaaaatgaaaatataaaaagtagtctctaaaagtgtaaaaagtgcgacaaatatatattcggttattaactcgtcgaccaccgttaataaaatagcctacgcgatatagagaaacgaattagtcactaaaataactgccaacatgatcatctttaattgtcagcataaggacatatntgtcatataatatttctttgacttttcatcttctcac

SEQ ID NO: 34952 - DNA, 431 bp, Glycine max
  unsure at all n locations
agctntgatgtgtgttgagaagaaatcacatgtttgtcatcatcaaaaagggggagaatgtgaatgtatgtatacatgattttgatgatgtcaaaagaagaatcatacaaggctcattttgcttcaagattaatacaagattttttcaacaaacaaagccttgattcaatatttcttcaagatcaagccttgcctcaaaatgtagagatttcaagtcatccaaggcacatgtaatcgattaccaatacatgtaatcgattaccaaggcacatgaaagtgtgtaatcgattacacatcatatgtaatcgattaccagagactctgaacgttgggaattcaaattataactgtgtaatcgattacacaaacattgtaatcgattaccagtggaaagttttagagaatctgccaacagtcacatcttttcatta

SEQ ID NO: 34953 - DNA, 334 bp, Glycine max
  unsure at all n locations
cttgattgagctaagatcacatgttgttattagttaaagaatgatgatatgaggaagtgcttagacaaagtaaatcacagcttcaaatctctcgattgtgaagatctttagtcatacgtgagttgtgttactttcttgagtacaagaagccaccttactcatgcaaacaaggttttgcggaaaggattgatcaagctgagtctatctatactcttggctgtgtgtgtatggntctacacatcttttatttgtgcatgaatcattgaaagcaagctagaataagtgtttctagtctggactatgggtaggtttctcttaggctcttattcacaga

SEQ ID NO: 34954 - DNA, 386 bp, Glycine max
  unsure at all n locations
agcttcaaagtaaggaaacatgcttatggctaggaatccaaaatttggttntaggattagaaaagcatgaaaatagggacttttttgtaaggatttgagctgccccgtgattggcactttgcacctaagtaacgtgggagatgctttttcaatggtgtgtagatatatgtgaatatatggcataagaatatgttgcaaagtgtgtgaatatatggcatgaaaataccttgcaaagtgaatgaatagtaaataatgcatttcaaaaatgtatatttgtggataggtagcgtaaaaataccttttaaaaaatgtatatttgtggataggtagcgtaaaaataccttttaaaatatgtatatttgtggataagtagtataagaagtctt

SEQ ID NO: 34955 - DNA, 312 bp, Glycine max
  unsure at all n locations
tctatagaaggtttgttcctaatttctctacaattgcatcacctctcaatgagctggtgaagaagaatgtggcatttaactggggtgaaaaacaagagcaagcatttgatttgctcaaacaaaagcttactaaggcacctgttctagctcttcctgacttttctaanacttttgagctagaatgtgatgcctctggagtggtagttgtagctgtattgttacaaggtgggcaccctattgcttattatagtgaaaaacttcatattgccacccttcactaccccacctatgataaagagctctatgccttaa

SEQ ID NO: 34956 - DNA, 368 bp, Glycine max
agcttcggttgtggttacattgacgtccctcagcttgttgcactctttcccgaccttgatggacgacgtgttgaactgttacttgaccgcttgcgccctttcaagattcacctttaaagcttgcacctcttctctctgctcatgggtttcaacctcttcctcacttgagatctttagcttctggagccaagttatctattgtgatctagccttcagccacttgtgataaccactgatgaccccattgctgcatccgctaagctgcttatcctttctttgcaccgcacttcatgcttttcggacactttgaaacgtccttgcattagggttactacaacctcgtgcgatgaaaggtgtgacactttctt

SEQ ID NO: 34957 - DNA, 79 bp, Glycine max
ggtgcacctcttataccatatttcttctggctcactgacatagaggtgcgaatcgatctaccttctcctacctgctata

SEQ ID NO: 34958 - DNA, 423 bp, Glycine max
agcttgccttgactctctacatgaagcatggcttgaaagtcaaccttcaaaggcgcgatgcttcagaaattgagaagtacttcaaagtttagagaaatattattgaatattgctaattaatattgttatgatttatatggggtgtcagaattatttctatacgtttttcaattacaagtaaggcttgatgtaagtaaacatatatactaggggatgcataatgttaatgaagtttattcagtgtgttatttttaaaaataaaattgaagatgtagtttcctaaactataaatatatagatgtaactctcgtaatagttataataatattcatatcttggaattacataaggtgttaagcataaaaaaattaataattaatatgaaataaatcttttcacatatatagataagtcatatacact

SEQ ID NO: 34959 - DNA, 272 bp, Glycine max
  unsure at all n locations
tccctcctgtngtgcaagtccacgtagttcaatggacccttccatgatctaatcctagaccatggtagcttggttgactaaggtcaatgtgggtcatgccaccaccaacggtcaaaggatctctgtcaccgccatctctgttggtcacgccaccatcaccttcttcctttgctgctggtctccgctcaacggcagccaccactcatcaatcttcctctgtcatcatccaccatggtttttcgccattcaaactgcgaacaaatagatgcagc

SEQ ID NO: 34960 - DNA, 420 bp, Glycine max
  unsure at all n locations
agcttctaatgaagtgtggagacccaaaatcattcatacttagacgaaattgtcataaagtgatagaagtcactgagacacgccgataaaggacaatgacaaaataggcgtctagaaagtgcttcactagaaaacgaacggcgagctaaaggcgatggccaaaaaacacgttgaanagagacaacgatagaataggcaatcaaaatgatttgttggaaaatgaacaacaaacaaaaggaggtggcaaccatcgtagagagagacgaacaaaaaatcatgaaccaataaagtgcatatnaacgtgttttcgtagtgggtccaactaaatgatcatgtatgtatggngacaaaactccaggtgtaggagcaaccattatgggcgaccaccatgctagaatgacagccagacaccagaaaact

SEQ ID NO: 34961 - DNA, 422 bp, Glycine max
tgtaaaaacttaagtctgaaatttctctatagataatgaacatttatggtcagaccagaccaacatcttttcacaatacagtgtttctgatatttttgactcagaaatttccattcatctcattggaaaagtccaacccacatttcactgtatattagattcaacttcttgatatcatgtgctaacgaagcacaagatttagactcatgatattgagttcgggatactcagaaatttaatctacaatgggcattttgttgaataaaaagcaggcaaaaattaaaatgaacaaaatcatgccaataataactatagaacattagacaacactgacaaacttagtcgcattagccactaattgaataacagagcttagttgcaaaatagtagtaagccaataaacatacacagaactagacaat

SEQ ID NO: 34962 - DNA, 373 bp, Glycine max
  unsure at all n locations
agcttggagagcaagtcttccttagtattgttttcccttggtatgtggtacattttgagcaattgaaattatcaacaagggtttttatgacatgatagtttatgaggagaaccacttccttggctcgatatatgttttcaacccatccttggacaagtttcgagtccttatagcacctgagtttccttgctcgaacttcatttgccagttttagacctgctatgagtgctttatattttgtttcattgtttgatgccttgaagtcaaatttgagggcatgctccanagtgacattgttgggtccttcaagcataatgcccgcctcatttcctttcacattggatgcaccatcaacatacaagttccaccagtt

SEQ ID NO: 34963 - DNA, 426 bp, Glycine max
  unsure at all n locations
tcacaaaagaaaagtggataatccacatattacaaaaggttgacttccacattaccatcccccacaaggaaacttgcaaacaagttnttctcaatagtttccctctcaccatctcacacaatccttctaataacaatagtaaacaagaaaagtgtcaatggatcaccttgtcttaaaattttttgagcgaaaaattcataagtatttcagcaacatcaaatggtacttgatgtcaaacatcccttaatccaatgaatccacttctcatcaaaacccaacctcttcatatagaacaagaaattccaattaatcanataataggttnttcataatctaaactaaagataagactntntctttttccttnttctttatcaatggtatcattcaccgccaacacactatgaagtangaattttctcccaa

SEQ ID NO: 34964 - DNA, 421 bp, Glycine max
  unsure at all n locations
agcttgtccctgtgcctcctcctgagatattgnggtggtctttccaatgataacatcctcaccagatactcgtgtgccctatttcataataattaattagttcttgtgaaattccttgaggatagatcaaaaaggcataaattcagatatgcttactggtggggcaagaccatcatcatccagcttatcataagaaccatgtctcattccctgaaaaatgaaacttggtaagaaaccaccaacaagaaaccaatactcttttccaaataaaaattgttaagcaagaatagttatttgctaccaaacccaaatttctcaccatggtgttagctctatcaggacggccacaatcttctttgaccagggttcccatcttcttctcttcatctctataanaagttaagaatacagcatatcataa

SEQ ID NO: 34965 - DNA, 370 bp, Glycine max
  unsure at all n locations
tataaatcaatatggaagtttgacataatccaacttttgcaatatgagattctcgaagtgttgtcattttaacctaatacaactttcatctttggatgattaaacattgagtgcttagtgtgcctattctttgcttaacaaacttaatttgtaatttgatctatatcgtattttctctttatgagagttatttgattgtaatcattcacacttgctgtttggaaagctagaatgacttagtgatccaagaatatttggatgttntccagttttacgatgagattaaaggtgtggtagaagtgattctaagaatacttattgtaagtcatgagtgccagagaataatacttattntgtagtcttttattga

SEQ ID NO: 34966 - DNA, 417 bp, Glycine max
  unsure at all n locations
agcttgtaacatgagttttatagatatggtttatttatttggttntaatttaagactacatgtgtttgttagttactgtgtgcaatattgtattgacagtgtaaaagtttggtgttactcatttaataaaaatgtcattgttgtattcctaagtaaattcaactgatatttggatgcagtaatgcttatcagccatcaggtttcagttttatgttgaatgtatgtatacttcatgcaatgtttatatttagtgtcttaagaagatgtggtgtaagtcaagtttagtgtgactttgtattacatcctttcttgtggttaaatggtatgacagtgtaatggtgcaacttttaattctgagtcatgataatcaacttctgaggctattatctataacacatcatcaatttgcatatgtga

SEQ ID NO: 34967 - DNA, 399 bp, Glycine max
  unsure at all n locations
tgtattgcaatcttgttctgtttgttaaaattggtgtctaattnttatatttaattagttntgttgctctaatgattnttttttccaattaaactagtggagagacaagcacatgtctgtccacatttttattttttattatatattaaaaatttatatttacaaaaagatgtgaaaatgaggaggatatgacagactatatagaanaatgatagaacgaaattaaaatagtttatatgagttaataaataagtaaatatttgtaataatcaatataaagaatactagcaggcataaattaagaaaataaaaataatttatttcgtattctagcctaatccattacaatgtggaccaattaaaatacggatcacttgtaacaaatcttaaacagcatga

SEQ ID NO: 34968 - DNA, 357 bp, Glycine max
agcttgtatttatttcttccttagtattgctttcccttggtatgtggtacattttgagcaattgagattatcaaccacggtttttatgacatgatactttatgaggagaaccacttccttggctcgatatatgttttcaacccatccttggacaagtttcgagtccttatagcacctgagtttacttgctcgaacttcatttgccagttttagacctgctatgagtgctttatattttgtttcattgtttgatgccttgaagtcaaatttgatggcatgctccaaagtgacattggtgggtccttcaagcataatgcccgcctcattttctttcacattggatgcaacatcaacata

SEQ ID NO: 34969 - DNA, 407 bp, Glycine max
  unsure at all n locations
tcacacnagataagtggataatccacatattacaaaatgttgactttcacattaccattccccacaacgaaacttgcagacaagattttctcaatagtttccctctcaccatctcacacaatccttctaataacaatagcaaacaagaaaagtgtcgatggatcaccttgtcttataattttttgagcgaaaaattcataaggatttcagcaacatcaaatggtacttgatgtcaaacatcccttaatccaatgaattcacttctcatcaaaacccaacctcttcatatagaacaagaaattcccattaatcacataataaggtcttcataatctcacttaaagataagacattgttttgtcctcttttctttatcaatgggatcattcaccgccaacacactatga

SEQ ID NO: 34970 - DNA, 329 bp, Glycine max
  unsure at all n locations
agcttgcaatgaattatattgtgtatgtacgagtctggtgtcaatctagacacacaaaccaaggccataattcaaaataggtaagatagaaatgatgatagtcattggcacaaacattgacttctgcaactgctactaagcttgcaatcaaagatattgtatatatagtaattaactttccattcagcaacacaaatttgctttatttgnncgcttaaatttgttagattgcctattcaatctgaaatgtaaaattctatcttacatcttttatttggacaatatgctacaaaagatgcgacaaagaagttnactaaaccttatattag

SEQ ID NO: 34971 - DNA, 318 bp, Glycine max
  unsure at all n locations
tgtaggattatggngtacccatcacatgtggtactaggtggcgtgtcggtcgatggtgcacaacaagttttccacatgcacaatgcgcgcataaacccaccatcctctgttgcccacctccaactgagctcacgtactcccacgtagcccatatcctcatttctctcaacaccgggttcccatcaatcctcccaagctttcacaacatncaagcaaaacatcattcaaacagcacaagctatcacagccaagataaacagagcgcaggcagaatactcttgccaaacaccaaccaaattacagcttttctcacttaaa

SEQ ID NO: 34972 - DNA, 380 bp, Glycine max
agcttcagactgctcaattgctccaggttgctgcatggaagggcaaaggtctgtatggtggtcagcagaggagcacaaaccacaaacccttgcgacaggtacagatttctgattcaaggccaactgggttaccaagttgaccaacgcatccagtttgccttcaagcttcttaatttcagatgatgcagatgggtttgtagctacctcatgcactcctctaatgattatggcatcatttctggcgctaaactgctgggagttggaggccatcttctcaattaaatttctggcttcagcaggagtcatgtctccaagggctccaccactggcagcatctatcatacttctcttcatattactgagtccttcataaaaatatt

SEQ ID NO: 34973 - DNA, 306 bp, Glycine max
  unsure at all n locations
tgaatctctttcaacttcttcttcttcttctttgtaccaaaagttntctgaagttttctggttttccaaaccttgaaaacttgtgctattcatcttttcattctcttctccctttgccaaaaagaattcgccaaggactaaccgcctgaattcttggtggggctctcttctcctttttccaaaagaacaaaggactaaccgcctgaattcttttgtgtctcccttatcccttgtcaaagaattcaaaacgacacagtctgagaattcttttgattcttcccattccctaatacaaaagtgttcaaa

SEQ ID NO: 34974 - DNA, 404 bp, Glycine max
  unsure at all n locations
agcttctttgaganaacttccttgagaagctagagcttagctacacacacccctctcataactaagctcacctccttgagaagcttccttaagaagattcctaaagaagctagagcttagctacacatacctctctaatagctaagctcacctccttgagatgagaagctagagcttagctacacacccnctataatagctaagctcacccccatgacaaaaaacatgaaaataaaaaaaaagtccttattacaaagacaactcanaatgccccgaaatacaaggctaaaaccctatactactagaatgggcaaaatacaaggcctagacgaaggaaaaacctattctagtatttacaaagataagcgggctcatacttagcccatgggctcgaaatctaccct

SEQ ID NO: 34975 - DNA, 438 bp, Glycine max
  unsure at all n locations
tatgctacaaacatctacaacagacctccttaacctcagcagctaaatcagccacaacagaataattatgacctctccagcaacaggtacaatcccgagtggagaatcatcccaaccttagatggtcgaatccttcacaacaacagcagcaacaacaacaaccttattttcaaaatgctgctggcccaagcagaccatacgttcctccaccaatccagcaacaacaacagcaacagccccaaaaacagcaaacagttgaggctcctccgcaacctttcctagaagaacttgtgaggcaaatgactatgcaaaacatgcagtttcgacaagagaccagagcttccattcagagcttaactaatcagatgggacaatnggctacacagttaaatcaacaacagtcccagaattctgacagattaccttctcaatctatct

SEQ ID NO: 34976 - DNA, 418 bp, Glycine max
  unsure at all n locations
ttgcttgtgctattccaagttcattaatcatacctttaagccagattgcttccttcactccttcagctagggccatgtattctgcttcagttgttgaaagagcaacaactgattgttgatttgctttccaattgattgttataccaaacaaagtaaacacatatcctgttaaggacttccttgtgtctacatttcctgcaaaatctgcatctacatagcctgtgactactgcctcgtgtgctgtcttcttgtaccttaaaccagctttcaaagatccatttagataccttagtgtccacttcacagtttgccagtgtgcgcttgcaggatttcccatgaatctgcttataatacttacagcatgagctaagtcaggtctgatgcaaccattccatacattatgcttncaacaccactg

SEQ ID NO: 34977 - DNA, 344 bp, Glycine max
  unsure at all n locations
tagtgatgcaagttcacaagctaagaattgtgtcatttctagaaatggaacataaacatcaaacttaaaataataatatgaaaaacacaatgagctcaagagtttatactgaagatgcaaatgtgggatgaaaattatttagatggattatataatttttcgactaaagaattaattaagactcattttataattntcttatgaaatttcatatttatttatcatgtaantaatttgaatgactcattatatngttttttcatcactttttatggtttttaggctttctaagtagctttaatgggatttttattcgtaatgaaaaataaatggtaataaaaatt

SEQ ID NO: 34978 - DNA, 420 bp, Glycine max
  unsure at all n locations
agcttcaagctgcatgtccaattccatttgatgaagccaatttgtggaaaggccaaagtggacctgagctaaaacagataattcaacaacaatttagaaacatcaggtattacttcaaactagtggaagtggactgagctctgtctagctaaatattatccattaataacttgcagggctntgttgtggcttagtctcttgtaagcatgcatcatactgctaaaaaatgacaattgattaccaatgattcgtagtaatgcttacaaaaccatttttgtggaaggaatcatagtatatataggttggattctatctaaaatcccatcattgatatttntagtcctacagtatggnttttcttttcatcttgagttntccacatactgatggatgctaaattggtttggtttatctggactc

SEQ ID NO: 34979 - DNA, 397 bp, Glycine max
  unsure at all n locations
gtcatccaatatatgcatgatgtcaataacgcacttagtaaacctatcacaccaatcaatcacatatgagtggcttgtgtacagactatttactctcaatgttttattctaaatagagacgtaggattgatttgctccattttttggactgatattaaatgtccattaaatattaacgaatttgaattatgcgtatgagttatgcaaatgaatctagccatatcatatatatatatagaacattacattacacgatgctaatcaattctccttcatcatgatcattacgattagcatgaacggcgtcagcttcttcttctccgacgacgttatgagtgatttgcacggtcaaaggactaacatangagtgcatgtatgaatcatcatcttctacatt

SEQ ID NO: 34980 - DNA, 230 bp, Glycine max
  unsure at all n locations
agcttatattgttgtgatnactctacaatactctcggtagtagctcttactagccatgaggtttggattacgagtgcactttgtgagagattattgaaaacgcatactcacatttaggtttaatgcagattcacggcttgccagctggactttaagagagatgataactccaaacatctaatatccgtatcttctatgtatgactaatgtactcaaacggtgccctctta

SEQ ID NO: 34981 - DNA, 309 bp, Glycine max
  unsure at all n locations
ttnnccgttggcacgngatgnggtgccacggaggacacaaactttttgactggatgcaagccttcactcgactatatctctattaccgactgaaacgggctggatgtggatcgatacgttagttttatgtatcgttcttctaaggctatcctcatctgaactggtacttattcacaatgtggctgggtagatatgggacacactgacgggtcatgtccccccagagtctccgatattacactcactcattcaactgctactatattcattataaatcatccaataaacggcatcttgcgctagaatata

SEQ ID NO: 34982 - DNA, 286 bp, Glycine max
  unsure at all n locations
agcttttagtatganatcaacttgatgatctatgcttgttgaaggtggcattccatgaggagtctacttgggaaagacatcttcttattcctgcgataaggagtgaacactatgagaaacataaatacgtaactgattaaaattatcactctctctatcttgtatatgacttcatctctcaagcgtatcactcttcctttctctatccctctgtgatgcctactattgtcactctcttgctctctcttttctatccttctgaatgggctatcacacacttctctaa

SEQ ID NO: 34983 - DNA, 258 bp, Glycine max
  unsure at all n locations
tctcctatttgtaatggagtggggtaccattactggaaaactcgtatgcgcattgttatagaggcaatagatttaaatgtctgggatgcatttgaagtagggccttatattcccaccatggttgctaggaatactacaatagtaaagcctatggaagattgcagtgacgaagaaagaagactaagacaacacaacttagaattcagcaacatattttcatctgccctatgaatggatggatactttanggtattcaac

SEQ ID NO: 34984 - DNA, 341 bp, Glycine max
agcttgtcatcaagttcttgatacaagaacacatatggatggcggtatatattaacttgcatgggctgtatgactgcaacatgattacactgaatttgttgtagtatgaccacaacaagttatggaacaaaactcagatataatttcttagaagccattatatcatgctctaattaaaattgaagctaagcttctataatgtgtattaaaggtattattagagaattatatgaattaactatgtgaaactttaatcttgattgaagaacgaacatcaaaatttgcatattaatcttatcctttttgatagattggttatggtgctattgtttaaacaatga

SEQ ID NO: 34985 - DNA, 389 bp, Glycine max
  unsure at all n locations
tatagaatatataataagataacaatgacaattgaagaatcgattcatgtttccattgatgagtctaatgctatttctccaagaaaggatattttagataatattgcagaatctttagaataaatgcacattcatggacaagattctaaaggaaaaggagaaggaagcaatgaagatcctccagtagaagtcaaagcaaataatgatcttccaagagagtggaaagcttcaagagatcatccncttgacaacattattggtgatatctcaaaaggggtaacaactagacactctctcanagatntatgcaataacatggcttttgtatctatgattgaacctaanaatttaaatgaagccataatagatgaaaatggataatagctatg

SEQ ID NO: 34986 - DNA, 374 bp, Glycine max
ctcggacccgggatcctctcaatagactgcagcatgaagcttttcattatttgagaataagcaaaaacctcaatgcccaacatatataaccttctctttctgctgggatgtgcctcttcctgctatgcgtcttcttgctgcataacacctcttcctcttcctcttcgatcatgaccacttcacaatgtcgtcgaagttcgacccctcccattgacgttttcatccgcataaccgatggcgaggctagtgcgacgagtacccctccacagcgtgagaatgaagagaacggctgagagtcttgatccgtcgagcgagaagatgagcataagaagagaaatgagcgatgtcttacggctgattcaaaataacatcat

SEQ ID NO: 34987 - DNA, 403 bp, Glycine max
  unsure at all n locations
ctaanatttgaattaaaacattcagaaactgctggtaatcgattaccatatatgtgtaatcgattacatagtgcaaattttgaattcagattttaatagctgttattaatcagttttggccactggtaatcgattacatcctctggtaatcgattaccagagagtaaatttcttgaaaaagactttttaacttaaatttcttggccaaaccttttgctacttcaattggaattcccttcctattaaatataccctttctaagactctagagactatcctgatcatccatcttgaatatctttaattcctttgtcttgaataaagctgtgagacgcatgtgaacctttggcatatcaaaacattcagcttgatcctttgtctacatattgggtagccatgaatc

SEQ ID NO: 34988 - DNA, 521 bp, Glycine max
  unsure at all n locations
tttgttggctggacgnacccacgagtgcgcatatacgagctacaggtcgagcgtgcggtacctcgtgggagtcctactcatgagtcgactctcgcagcgcattgcgtcatcttcgtacgcatatattaggactacagactatcataccaccactgtgagattcgttgactacatctcattgcaacgcatggccacttgtatatccaaggtatcatacctttcaccgacatgtgttatacaaccatccaagctattcctgatattacgaataacagaggaatcttatccacacatgtccatctacatcaacatgtctagcaccattgttcacacaggaaccaactgctctgtttgttaaccacgatgcatgacccgctacctatatatatgatcgttgacagaacaaaggttcagaatacataggatgttgcgtgtcatggaagagatgaatacgtggcatantgcaatgacacattaatcggatgcctattctgagacaatgactaactggccatccatct

SEQ ID NO: 34989 - DNA, 322 bp, Glycine max
gatggtgcctactcctttctctcatactttgccttccactgcatgagcatggaggttatctaccattgcacgaccggatttgagctttgagatgcttactgcctatgaggatccacacgcaagatcccattgatacccttggtgggtaggattgcatcgtgatgtgactactttacctttagacaaagccttgatttatgctcgttatccctatctttactacttgtgctgagctggaatacatatatggcgattcaggatgtgcccctgatctgtgttcatcttcatacgctttccatacattagcatggacctgttcaat

SEQ ID NO: 34990 - DNA, 241 bp, Glycine max
ttcttgtgactcttggccatatgttttataaactagtcacttataatgttgagacttttgaaagaatcttcagaaacaagacacttagagaattatgacttttggaaatgaatttttcgaaatcatacactggtaatcgattaccattaatgtgtaatcgattacacatcaacatatgtgactctgcattttgaattttgagaagtaaaacgttcaaaggctcatgtaatctattacaagg

SEQ ID NO: 34991 - DNA, 184 bp, Glycine max
gtttatatgacacactcgtgacatgccacgatgtatgttgtactatgcctccaagcgcatgcagcgacataacaaatgagtaaataccgctcgtatgagtgcagagagttatgtgttgaaatgagcccctttgctcacatcatactgctgcaaagcatgtgcatcgcctgctgtggtattggac

SEQ ID NO: 34992 - DNA, 375 bp, Glycine max
  unsure at all n locations
agcttaattctacacatganaaagaggatgagatagttgcacaaaagagaaagcttcctaacaaaaattttcatgcaggtggaccttcttctagtagttatgacttaccgcagcctcttatccctcttccattcccacctagagcaattccaaacaaaaaaatggaagaagcggaaaaggagatcttggagaccttcaggaaagtagaagtgagcatacctctgcaagatgccatcaagcatattccaagatatgccaagtttctaaaggagttgtgcacctacaaaaggaatctcanaggcaatgaaaggattagcatgggcagaaatgtgtcaacattgataggtanatctgttcctcgcattcctgagaaat

SEQ ID NO: 34993 - DNA, 313 bp, Glycine max
  unsure at all n locations
tgtaatcgattacacatatactgtaatcgattaccagagtatattnttagaaaatattctcaacagtcacatctttttatgtggttcttgaatgactatcaaaggcctatatatatgtgacttgagacacgaatttgcgaagagtttttcagaacaaaaaggtcttatcctcttataaagaaaaatcggtttatcctcttacaaattccttggccaaattacttatgattcaataaggaattatttgagtgctcanattgttcaatctatctttttcaagagagatttcttcttttcttcttcttcattctga

SEQ ID NO: 34994 - DNA, 446 bp, Glycine max
  unsure at all n locations
gaagctttgttttcataaaacatttaaaaaaatttcacaaccccaatccaatcctttntttgtggtatttatataacttcaaaagtttctatattctaaaattattgtcacttttgaatatattaggaatacacttgaggaatatggatctactgaggagttgctgagtatcattaatgggtctatcaagtctaccaattcacaaattcaggtaatcgacaataacttatggntataattatatacttgatgttttttttttatttctaattaattattctaaaaataagttacaccaaggatattttttgcaaccattatttttgggagttcttcccccatcaaaatatatgtgcaagagaggtgtgaaaaactcaaggcaaataatatggggagatgtagaccaatattctaaacatattanatgtagaggatgtgaatcttat

SEQ ID NO: 34995 - DNA, 302 bp, Glycine max
tacgtaagattgaaagaaacatacatatatatttgaaataatttatatttaaaattataagggatttttgcataactaattcaggtagaatttagatatataggaggggaaaatttataattataaagaagatacacataattaattcatgagaatttaaatttaacatttttaaagaagttaataatgatgagtgtagactaacgttattcataagatacttctatactctaatttcattcatacgactggagcagatgattcaaaacatgagaacttaggtgcaacatctataataatat

SEQ ID NO: 34996 - DNA, 139 bp, Glycine max
  unsure at all n locations
agcttaaggagtgggctcgtgaaataggctatgtcaactatttaacaataaagaanaaattaaagccggactgaccctagcctagatgattntgtgggtgtttcttcatgtgaattttgagcattgctatgcgcaccca

SEQ ID NO: 34997 - DNA, 277 bp, Glycine max
tatactcgattctctgaacaccgggtcccggtcaattctcccaagcttcccaaacatccaaacaaaacgacattctgaccgcacaagctatcacagccaagcaaaacagagcataggcagaaaactctgccaaaacaccaaccaaatcacagcttttctcacttatagaccccagtaacaattccttcgttccggttcattaaccattggatcgactcgaaaatgttactggagatctctaatacttaagcctacattttgaccgctgggatctact

SEQ ID NO: 34998 - DNA, 359 bp, Glycine max
agctttgatgttgttagtcgtcatttggatgtcgagagtgtcatcttgttggattctgagaagaagatcaataaaatcttggtcctctaattcagctccatcttcttttgcaattttgttcttttcttgatgctctctgatgatggtttccaggaccttgtcaacctgcttgtgcaacttcttcaatctggtcatctttccagttaggaaatataagaatggaattgaaggatagacatcatcaaggtcgaatcctcccccggattctacgatttttcggatcaaagacaccacaaactcatcttgctccttgcatatgccaccgactgctatcctgtaaatagaggctcatatcaatg

SEQ ID NO: 34999 - DNA, 459 bp, Glycine max
  unsure at all n locations
tgaagaaagagtcatagatgcttttataaaatctataatttatagtttgtaattgcagtaggtattattgaactcatcacctcacgaacgaattctattaattattttaatacggttaattctttggacataaaacataataacttgcatttgaaggatcaaatcagtataaagtaaaataaaggaggtaaataaggagaaattgtttatctttgaaggacataatgagaaattgttaagaaaataatcaaatactactgcccagttagatactttgacttggtgcccaacagcaattagagtgcatcgacaatttctattttgacttagtgtgcatgtgcaacagcaattatagctttcaacggtcaaggttctcactgccacattaactattgttgaccaagtggcacttatatatctacaatagtattacacantatagaggagtaacgatgacat

SEQ ID NO: 35000 - DNA, 348 bp, Glycine max
  unsure at all n locations
agctttgagcatattcaaacgagaaataaatttgactcggatgtccgattgagccctgtaatatatcgagacgctcgtaattgaaaactgaagctttgagcacattcaaacgagaataaattntgactcggatgtccgattgagccgtaatatatcgaaacgctcgtaatagagaacgaaagcacgtagcaaattcaaaccacaataaattttaactcggatgttcgattgagttctataatatatcgagacacttgatattgaaaacagaagctctgagcagattcaaacgacaataactctntactacgatgttcgaatgagacccgtatatatctagaatctcgt

SEQ ID NO: 35001 - DNA, 322 bp, Glycine max
cttatgaacgattctggttttctaaaccttgaaaacttgtacttttcatccttttcattctcttctccctctgccatatagaaggcgccaaggactaaccgcctgaattctttttgtgaacaagagatggcacatctcttgtggatcagttctagtggagggtacatccactagggtttcaaagagaacaagggagggtacatcccttgcggatctttgcttgtaataagattcttacaaggttgaaagagattccaaggaccgcaggtcgctttgggactggaggtatgcactggttgtcgctgaactactgataaaactc

SEQ ID NO: 35002 - DNA, 416 bp, Glycine max
  unsure at all n locations
agcttatgctcttattgtacctgtatctttctttcattntgaatcatctcaagtttcatcttcggagcataaatagggacaattgtttttcaataaatcaattcatgaaatgtcaactacaggtagattattcttacttttacattctacattgaataaacaacatctgtgaattataaaccttatctaataggtttgagaaagcttatggatgatatgaaaacttataatcccaccgataggggttcttttacttatcttttatcagntagttcagatacattactcgatgaagaaagaatgtgtagttcttaacttattgcttgaaagctctnttatagacaagtcttttcttatcacatcggacaatgaactataagcgattatttagttcatatcttttaaagaacattcat

SEQ ID NO: 35003 - DNA, 298 bp, Glycine max
tgcatgattcacattctccacctttgtcaagcatattcttttttatatcatcaaaacctgcatgatttacattctccccctttttgatgatgacaagcattatccaaggcttgatctttatgacatcatcaaaatcttcatgatttacattctccccctttctgatgatgataaccacctataagttatgagcaacaactaagaaaacatatctatttgcatatagattactcccccttggttttggaatggttgcttatatgaaacaattgaagatttcatatttttcatatataaa

SEQ ID NO: 35004 - DNA, 433 bp, Glycine max
  unsure at all n locations
agcttgtatgattatggngtacccatcacatgtggtactaggtggcggtcgggcgatggtgcacaacaagtttttccacatccacaatgcgcgcataaacccaccatcccctgtagcccacctccaactgagctcacgtactcccacgtagcccatatcctcgtttctctcaacaccgggtccccatcaatcctcccaagcttccccaacatcaaagtaatacaacattcaaacagcacaaactatcacagccaagaaaacagagcaaaggcagaaaactctgccaaaacaccaaccaaaatcacagctnttctcacttatagaccccagtaacaattccttcgttccaattcgttaaccgttggatcgaactccaaattttactggaagtctctagtacataagcctacattntgaccgttgggatctacta

SEQ ID NO: 35005 - DNA, 435 bp, Glycine max
  unsure at all n locations
tgtaggattatggngtacccatcacatgtggtcctaggtggcggtcgggcgatggtgcagaacaagttttccatatccacaaagcgcgcataaacccaccatcccctgttgcccacctccatctgagctcacgtactcccacgtagcccatatcctcgtttctctcaacaccgggtccccatcaatcctcccaagcttccaaaacatccaaacaaaacgacattcaaaccgcacaagctatcacagccaagcaaaacagagcataggcagaaaactctgccaaaacaccaaccaaatcacagcttttctcacttaaagaccccagtaacaattccttcgttccggttcattaaccattggatcgactcgaanattttactggaaatctctaatacttaagcctacattntgaccgttgggatctactagcataca

SEQ ID NO: 35006 - DNA, 431 bp, Glycine max
  unsure at all n locations
agctntacatcagaatttagtaatgacccactaacctagaattaaaataacttaatgccattaacctagggaattaaaaaaacttaatggctgagtgtaactgaaattgtggcaaccaaaagtcacccccaacagccaacaagtcagccaccatttggtctcccaaaaggctgatgcctaggttgccaattgggcccttattacaacttgaactaaacctaactaaagtccttttagttgattaacccaaaacatatttttggtcagccaactttacaaggattgggccattatttagacaaactaaacactctataattgaaacaaagtggtgtcatttagtcctcctccatttgggccatgatacaactcacaaccttggacttttctccttgaaacttgngcttgtattcaaacagtatggacagcac

SEQ ID NO: 35007 - DNA, 452 bp, Glycine max
  unsure at all n locations
tcatgagagagtcaaagatcaaattgagaggaanaataaaagctatgctaaacaagccaacaaagggagaaagaaggttgtcttcgaacccggagattgggtttgggtgcacatgagaaaagaaaggtttccgaaacaaaggaaatcaaagcttcaaccaaggggagatggaccatttcaagtgcttgaaagaatcaatgacaatgcttacaaagttgagctgcccggtgagtataatgttagttccaccttcaatgtctctgatttatctctttttgatgcagatggagaattcgatttgaggacaaatccttctcatgagggagagaatgatgaggacatgaccaagagcaagggcaaggatccacttgaaggacttggaggacctatgacaagggctagagcaaggaaagccaaggaagctcttcaacaagtgctgtccatactatttg

SEQ ID NO: 35008 - DNA, 260 bp, Glycine max
  unsure at all n locations
agcttctcctctattntgctataaataggggaagaagtgaagaagaaaagggttcagccccttaggcacttctctctctttcgaatttgcttaggaaaattgtttccgtgaataaaatccaagccgaggcgcttccgtaacgtttccgtaacgtttccgtgagtaattacgcgaagattcatcgttcgttcttcattttcttcagtcttcaacgggtaagtacctcagaccaagcttttcaattcattatatgtacccgc

SEQ ID NO: 35009 - DNA, 176 bp, Glycine max
tctaaggattatgccgcgtatctgggaatgtatgattgaatgtgatatcagttgatttgtgcaccactagcttttgattgatctgaaccttggagatttcgagttcacattgtgggaattgagcgaacatattacatgataacactcatttaaatgatcatatcatgataaagtag

SEQ ID NO: 35010 - DNA, 330 bp, Glycine max
  unsure at all n locations
tagctntggaatatgaacagactgaagtatctactctgatctgtgactccaagcagttgaagaagttggatgcaataagatcaagactaatatctttacaaaatattatttactttgaagatgataacgaagaagatgctttctctggaagttcaagcggctggacaattgcatcttttagtgaagttgagaaacttgagaaagaaagtcctgttgagccaagcctgccttccaagaatgctattgcagttatcatgtacacaagtggcagtacaggtctgccaaaggtgtgtttctttatcaagttgtagagaaatctatctatgtgat

SEQ ID NO: 35011 - DNA, 454 bp, Glycine max
acgctattgagtgacaacacattgatagacgtacagaacgttattgctatcgtttagcgccttgacctcgttgacatgcaagcgtcctcaatcacgaagactggaacaaacgcgatgctattgatatagcgagataaatgaggctcagcacagtgactggtggaatccctagcggagcagactcatcgactagttaggccgcgagctatgcaagcatcaacaattttagtgaaagtacttcatgacatatatcggaactgactaacatatcagacctgacgcatgatcaaaccaaattcctactgcacttgtcttagataaaagatcatgggaaatcctcgtattctgtagtccgaaccatgagccactctatgtgcagaacgctcatgcgattggtcagcagcttgccctagtgaacgtgatctattagatgatgaatcttctgacaacaccg

SEQ ID NO: 35012 - DNA, 306 bp, Glycine max
  unsure at all n locations
agctntacatatttgttntanaatctatagcggcataactgcactgttaaaggtcaatcagtagatgcacattatgttgattcaaccagtatgtgttcttgccaggaaattgtgccgcttangaagatttgtcgccggcccgaaaccgattatcggttacagcaacttcatgctgtgaatgaggcagcacctgtggatcagcagaagactggcatggatccagcagcatatgttaatgccgtgagggctactactactgaaacagtgccaaagcagctgattgcagcaaacattcatatggagacg

SEQ ID NO: 35013 - DNA, 240 bp, Glycine max
gtgagccataatcctgactcaccataaaccttgtccctgtgtgataatgtccatccttaccctcgggagcgatgaagattagacgggaaatttccgatcggagcacaagagaaggagaattgcccacgaaagcaaagaaagaaaagattgaaccttccccagtcagacagtgcgagaatgcttgaaaagatcagagagaatgcttcccaatctgagcatgggagagagcataatgataag

SEQ ID NO: 35014 - DNA, 450 bp, Glycine max
  unsure at all n locations
agctntgcttctacttaggtcttaagtataacttactaagcataagtcaattgtgcgacggtggttatattgtatccttcaacaaagagtaatgtatagtcaagacaaaagatgacaagtcctttgttactaccaaatgacacaacaatctgcatgagattgatctaataggtctaagtaaacagaatgtgacatgtctgctttctagagaagatgagagatggatttggcatagaaaacatagtaatgtcaatttgaaacgtatttcataactttctaaaaaagatttagtgaaaggactacctaagatttgttggaaaacccatcttctctgtgaaggatgtcaacaagggaaatagatcanaacttattntanatctaaagatggtgtttccaccattaaaccattacacatattgcacatagatatgtttggaccaacttgaaccg

SEQ ID NO: 35015 - DNA, 338 bp, Glycine max
tagacgatagccacgtctcagaataggaagcatagagagtgctctcaacaagctctcaacacgttggatacttggttcacagacgaaagcaataacgttgacttcaagatggtttatgctatgaagaatgtgagaattatgaagtgtctgacttggaatggctctcacaatagggattcaaatttcccaacttgctagaagcacagggtctgtcatagcttgtgtatatgaggggaaccttttgcccataatttgtaaaagtgttctacacatgtgctaaagcagatatggaaggagacttgtactctactgtcaatggtgcaaagatggtcattgat

SEQ ID NO: 35016 - DNA, 246 bp, Glycine max
agcttgatgttaaatagtctaccagcaaatgtaaccaaacacgatatctatcatgtcaactaaatattctgatctgcaatgtagttggacccaagaaatattttctaatcttcaccaaatttcctttttctaacatgtacaagagacacataacttacccaaacccttgccatctacatggtctacttctgcacaggtgatcaattttatcactaaagcatacttaacagcatatggtttgagccg

SEQ ID NO: 35017 - DNA, 250 bp, Glycine max
  unsure at all n locations
tgaagganaacttgatgccttggtcaacctagtaactcagcttgccatgaataagaaatctacacctgttgcaagagtctgtggtctatgttcttctgcagatcaccatacagatctttgtccttatttggagcaatctggagtcaatgagcaacctgaagcttatgtagcaaacatttataatataccccctccatagcggaacctacaacaacagaatgattatgatctttcaagcaacagatacaat

SEQ ID NO: 35018 - DNA, 443 bp, Glycine max
  unsure at all n locations
agctntaacaaatctttctttatggngaatcaaccatgtttgcttcacgtagttaacaaacattggtcatgttgagcaagcaatttcaaacttcataaggcagtcatcaaactcttgcttagaaggacaatccaccagactttcccaggcttccatgacataatcccatgcatttttttaccaacaagggttttacatttttccttcacattcttatcaatgtgaaacaaacacaacaaattggtagactcagggaaaatagttttcactgcattcatcaatgctaaatctttgtcagaaacaatgactccagagtgtgtgcatcacgtctcanataaatacttcgaaaccattcttgagctcatacaacattgtttacacgttctccctccaagtaggaaaaagcagctgaaaatgtcatccctgttggtgtcacaccaaca

SEQ ID NO: 35019 - DNA, 454 bp, Glycine max
  unsure at all n locations
tcgcccctagttgcgcattgtgtgtaaatacatgatcctgtgtatgatgatcacggatacaaggcaaccagggaatgatattgatgtgtatcttacaccattaatcgaagacttgaaaaaattgtgggaagaatgagtagatgcgtgggatgcaaatgtgcagcatacattcacattacacgcaatggtgttttgtactattaatgattatccagcatatggaaatttaagtggatatagtgtgaaaaggcatcatgcatgtcctatctgtgagaaaaacacaagcttcatccaactcaagcatggaaagaagacagtatatacgagacaccaaagatttctgatagcttttcacccttattgatgattgaaaaaatcttntaatggaagtcaggagaatgaaggctccccagaaccattaactggaaaccaagttcatgatcgggtaaaggac

SEQ ID NO: 35020 - DNA, 437 bp, Glycine max
  unsure at all n locations
agcttaatacccataatcacatctacaggaccaaggtccttcatatcaaaaattttagacaagaaagacttcacatcatttatgaattgcatattactaccaaatatcaatatgtcatccacatacaaacataaaatgacacatccattatcatcaaattgtttcacatacacacatttatcagtattattgattagaaaaccatacgaaagaacaatttgatcaaatttttcgtgccattgctttggagcttatttcaaaccatataaagatttaacaagtttgcaaactttcttttctttccccggttctacaaagcctttaagttggctcatataaatttcttcttctaattcaccatttaaaaagggcagttttacatccatttgatgaaatttctaaataanaacacaagcaagtgcaattaagaccctaat

SEQ ID NO: 35021 - DNA, 457 bp, Glycine max
  unsure at all n locations
tgcctctagccagctgaatgttgccgagaggatcgaagaacttctcctacatgtagccaaccttgagcatgcatctaacccttcagcctcaccatcttcttcctcgcccaaccccgcaccaaacacaacccataacccaccaaaaatgaaactcaatgttccaaaatttaatggcaccgacccctctgggtgggtgttcaaaaccacccaattttttgcctatcactctacgctgaaaccaaagcgccttaccatcgcctccttcgctatggaaggccccgctcttacgtggttctagtggatgacccgcaaccaccagctcccgacgtgggtggcgtttttgcaggccattgagacgcgcttcgcccactccccatacgaggacccaacaggaatcctcttcanactcacacaacggngctcggntagcgattacctgcatcagttngaagctcta

SEQ ID NO: 35022 - DNA, 323 bp, Glycine max
agctgttccttttcagcatattcatatgtgacgcaacctacccttcagcgggagggcgacgtgtgactcacggatgtgtgtttcaacaaaggaatatgcacggagtcgccaccaacgtatatttgaagaaaacgtctgacaaatcggatgagacgtgatctacgaacttttagtgaaaagctccggagtcgcatttacgcacggagactgtattagcatcccactcgtacatcactagagatggcagccttatctcagacgtgcaaatatgacttaagtttatgactccttccctttatacattcttatggcgtttttatgcc

SEQ ID NO: 35023 - DNA, 460 bp, Glycine max
  unsure at all n locations
ngtctntctttggccctataattggtatcacaagattnttgtggctctgtggcccttcacttcaaaattaggagtagattatgcttgaatgaagaacatgtgttctgttcattaaatgctggattaatattcacttgctttacttgtgctcagtttgatattggttctcaagttgttggccagaaggacacgtcaaagaatgttctagacgtctggaaagaggtaacagacaccactcttttaaattgtctatttcctatccagtaattgcctaacagtactactttaaatttaccatctttagcattgcgtgatattctttgtgtagatattccacaagagaagaacaaacaagacggacagacaatctcatagaggcaagtcctttgaatttgactccttgtactcccttgtttcaaaccggtaggccatattttactgttttactcatttctccatc

SEQ ID NO: 35024 - DNA, 431 bp, Glycine max
  unsure at all n locations
agcttgcctatccgatgcagcagtaatgatggcccgagttatgttgggaaatggttacgaacccggaatgggtttaggcaaagacaacggcggcataactagcttgataaatgccaaaggaaatcgtgggaagtatggtttaggctataaacccactcaggcagatataaagagaagcatcacggatagaaagagcggtggtcaaagctcgcggttgaggcaagatagtgaaggaagcccgccctgccacataagtagaagctctataagcgcgggtctgggagacgaaagtcaagtggtcgcgatatacgaagatgatgttccaagtacattggaattggtacgaacatgccctcctgatttccagctgggaaatnggcaagtggaggaacgccccggcatttacgcaatgagcataatgtaaaccttta

SEQ ID NO: 35025 - DNA, 368 bp, Glycine max
  unsure at all n locations
taatctacatgtccaagcctcctctcccattgaacccaacactatcacccaggcccttcgcgaccctgattggcgctcagccatgcaagccgaatctgatgccttacaccacaacatcacttgagatcttgtcagtcggtcctctgatcaaaatttggttggctgtanatgggtatttcgaatctaacgaaatccagacggatcaattgatcgttacaaggctctgttagtcgccaaagggtttcaccaacgctctggttgggactatacagaaacttttagccccgttgttaaaccggtgaccattcgcattgtcctaactctcgcagttcgtcaagggtggcccatacgtcagcttgatgtcaaca

SEQ ID NO: 35026 - DNA, 313 bp, Glycine max
  unsure at all n locations
agcttataataatgaaaggcatgaatcanatgtgataaactggtctcaactagaggggatcccttttatcaaattctcaatcatagtaataataggcgacaatagtagcatcttcccttcgatccggagacgacgacatctccctaaagatctggtgatgatgacaacatatccacaaagatccagtgacaatgacaacttctgtgacttaagcaactttaacagcacattgtttgagccgaagtttaagagtggaagttgtgtcgtcgtagtcatggaggcgatagatgaagacgaagtcaaagctgtgact

SEQ ID NO: 35027 - DNA, 128 bp, Glycine max
tgtggagttgaatgcaaaggaggaggaagaagaacctcgtgttgttcacagctgagttggtggtggaatctcgtggttgcaaagaagaagctcattggtggtggagctgaacaatgatgaggaagaag

SEQ ID NO: 35028 - DNA, 190 bp, Glycine max
agcttattgtctactctttggtctcaggtgagcccataagtgtggtactagtataggaagaacggagtgagttgaggctagtacatttcgtgagccaagtactttacgattgagaaacgaggtatcgtattatggaaaaggtatccctcgcacttgttaacgtcgcccattgtctgtgctaatattctct

SEQ ID NO: 35029 - DNA, 282 bp, Glycine max
tgcttctacaccaaggaattcttaagaggataaaatgtttttactctttgagagaataagactttctgttctgaaaaaactcttaacaaattcgtgtttcaagtctcatataaatagtcttttgatggctatgtaaaaaccatttgaaaagttgtgactcttggaaataattttctgaaaatctcctctggtaattgattacaagatttgtgtaatcgattacaggctgtaaaatttgaataaaagacgtttattaactgctattaatcgagcaccactatt

SEQ ID NO: 35030 - DNA, 200 bp, Glycine max
agcttcagatatagatatattggcactgcagactgagaaagagcttgtatggagcttgtatgacaattcctatgaatagcattgtgagattgaataccggattacagaaatgcataatcgggtttgcatattgcgactacgagccttgtcttcatactgtgtctcatgcacacacttctcagttgtatctattataacct

SEQ ID NO: 35031 - DNA, 166 bp, Glycine max
tcaatattagaagcatttgaatcaagaaggccaagtaaatctctgattattttcattcttgcgggtgcatccttacagccagacagatatctgaaaatcagaggcaacatttgaggaagtaaaaaatgactacccttgcttctcaccctctccacgtggttatgtc

SEQ ID NO: 35032 - DNA, 442 bp, Glycine max
  unsure at all n locations
agcttgtaggcctaggatcttctttatcaatggactcctttacttcttggaagatgaatgacagtggaatggagaaggaagagagagagaggagatgccacttcaaggagaagatgagtctagaaggagctcaccaccataggaggccatggataagagcttggaggaagaagaagataaatgaagggagaggaagagaagaacacgaaattttatgctttacaagagctctaaaatctgaagtttaattttcaaatgatcaaagttcaaaaaaatacacacacatgacctctatttatatcctaagtgtcacacaaaattggaggaaaatttgaatttctattcacatctcacttacatttganattaaatttgtggagccaaaatttcactaattatgattagtggaatttagctatggttcagtccactagtccaagat

SEQ ID NO: 35033 - DNA, 456 bp, Glycine max
  unsure at all n locations
taaagtctcacgattgccatatcttgatgcaataattgttattcgtggccatacgagacatttttcctaacaaagtcaaacatgccataactcaatcgtgctttttcttcaatgtcatatgtagcaaagtccttgatcctgccaagttagatgagctagaaaatgaggctaccaatacattgtgtcagatggagatgtattttcctcctgtgttcttcggcattgtggttcacttaattgttcatctggtgagggaaattaaatgttatggtcttgtttatttgtggtggatgtacccgattgaacaatactagaagatcttaanatggtatacaaagaatctacaccgttttgaagcatctattgtgggaaggtacattgtagaagaagctattgagttttgttcagagtacattgaaaaggcaaaacttgttgtgcttcccaagtctcgacatg

SEQ ID NO: 35034 - DNA, 435 bp, Glycine max
  unsure at all n locations
agctttgaatggaagaatatcccaacctatgttagtaagagactaatagtatttttatgtacttcttgacattcccccccttaacgtaataatcaacaagaaacaaactttcttcttaccaaacaaagaagaaacaaactttctgttgtacctctatttttattttattgaggtaacccagtactagctctgatcacatcatcaccatctgatgggaagcgtaaatgttgatcaattgacaaatacaaacacgttatgtgatgtataaagtgtgaatatttcatttataataagttcaagcgggtgtttatctttttggtatgaataatcatatgcacaatcctgagaagttgangcacgaaaccatgattatctaagatacactgacagaaataattgaagtatataactctttgattaatcatatacggaaca

SEQ ID NO: 35035 - DNA, 330 bp, Glycine max
  unsure at all n locations
tagcttgaatctgacatccgtgtgaaaagttatgaccatntgaatttctcaagagcttccgttgttcaatntcgagcctctcgacatattatgcacccgaatcggacatccgtgtgaaaagttatgatcatttgaatttctcgagagtctccgatgtttaatttcgagcgtatcaatattttataaccgcgaatcggacctcactgtgacaagctatgaccatttgaattcgacgagagcttccgttgttcaatttcgaatatcactatatgtgatgcgcctaaattggacattcgagataaaagctatgaccattaggatgtctcaaga

SEQ ID NO: 35036 - DNA, 244 bp, Glycine max
cataatataacgacacgctcgaaaataccgattgaatctctcgtgacactcaaaaagtcataacttgccacactgaagtccgattcagtcgcataatatgacgagaggctcgaaattgaacagcgcacgctcttgagaaattaaagtggtataaccttttccactgaagctctcatgaaagacaaatggtcatacctcttcacactgatgtccgactcaagcttataacatatctatacgctcg

SEQ ID NO: 35037 - DNA, 410 bp, Glycine max
  unsure at all n locations
agctntataagcgcgggttcgggagacaaaggtcaagcgttcgcgatatgcgaagatgatattccgagtactttggatttggtacgaccatgccctcctgatttccagctgggaaattggcgagtggaggaacgccccggcatttacgcaacaagcataatgtaaacctttacggttttaaaagctctatagttgggcctaggctttagagtttttccttttgttaaggctttgagtcttttgtttttgaatttataatacaaggatctttcttcatctgttcctggtctctacccattctcattcatttgcatgtttacttctttttctgaaacggcagatccgatgacgagtcccccgaagtactaatacctgggacccgtctatcgacttcgagcaagaaatgaatc

SEQ ID NO: 35038 - DNA, 343 bp, Glycine max
tatcagttaagattatcacagaccttgtatgcgtctcactgtcttcaaaaagatcatttttactattttgcaagtcttcgtaatctttatgtagaacaacatggtttgtctgaagatcatacctttcttcattaagctaatcttgcaactctttaagtactttcaacttattttgaactacctcaatctttgtgtctacatcatgagagttctataataagatatccttttctttggatagctgttcattttcaagttggagcatgacttcggaattttgcctttttacaaatcattgcttattgaaatagattataagacctaccattttttcttcttaaca

SEQ ID NO: 35039 - DNA, 398 bp, Glycine max
  unsure at all n locations
agctntgtcttttcttctatctttntctctcaattgttcttcattcttcttcatcttttcacttttgttccaccattttcttacacaaatttcgtgttttctctattggtgatgatcatggagggttaaacaattaatcaatccaaggatccactgcaagcaaagctgaatttgagtcctggtttggtttttctactctgtgtgaatgttcttctttctcttcaatcctattttcatttttcatgattgtgactatgttcatgattgaaaattgattacgttatggattcatttcctaatttcaaaatntaatcacagattgttaggatgatcttncaacataatttgtgagttcaaacaatttagagatttgattcgattgaacttctctaatgcat

SEQ ID NO: 35040 - DNA, 191 bp, Glycine max
  unsure at all n locations
tacacaagcattcattagtccaacacacactcaacaaatagttatcatccatccatagntccaatcaatcatgctcagtatgatgcatgcacctaacctcaactctcaaatgcaatgtggtaccatccccaaggaaatagcctaagcgtgtccacacgacactctcacttatgaaaactatgcagtaagtg

SEQ ID NO: 35041 - DNA, 247 bp, Glycine max
agcttgcagtatattcacacgagtcaaaagaaactgtattttactgtaacctcgagtgaatatacagtatattaactttaggctaccataaaatcattttctcttgaatgatgatatatactcagcacatttgtagaatctattttagaataaaaaaagggaaagaaatatgaaatgtgcatgatgtgtgatataataaaaagagatgacatgacagacattactctataaattagtgtatgtgtcc

SEQ ID NO: 35042 - DNA, 262 bp, Glycine max
  unsure at all n locations
tattgttcccactaagtctatgcctcacgctgagagcctggatgagctaagcatgcctcttcagatttctaattatgctcttttggactttattttactcattaagcatcataaattcatcaactnttaatgttttctacgcaaaaacttaaatgatattaaaataacacttattagcccacaatagaatatatatgagagaacctcacctacattgattaacctcactattcactcatattttaactccaaaatacactca

SEQ ID NO: 35043 - DNA, 382 bp, Glycine max
agcttggatgaagaatgagatgaatgaagggagagggagagaagagcacgaaattgtgtgctctaaaagagctctgaaatctaaagttaatattcaaatgatcaaagttcaaaaaaatgcacacacatgacctctatttatagcctaagtgtcacacaaaattggagggaaatttgaattttaattcaaatttcacttgaatttgaaattgaatttggggagccaaactttggagccaaaatttcactaattatgattagtgaattttagttatagttcagcccagtaatccaagatcaattccaagattctccactaagtgtgcttaagtgtcatgaggcatgtaaagcatgaaagacatgcacaaaatgtgactatatga

SEQ ID NO: 35044 - DNA, 442 bp, Glycine max
tataagaacagaattgcctcaatcattgccaaatatgcatgttaattattaagcatcaacaagaatcaatccaacgctattgtgcaagcaatcaatggggcaaaacacaccaaatgattatgatgatggatggctcaaattctcacaaaggtaaactcatcattttcaaattgagatttcaaaactatcatgacatgtagaggagaatcgaggatttcaagtcacagaatgtcaagaacttttattttcaaaacaattacccatttcttgaacatatcctataattcaaagaaaaacatgcaaagtcgtacatgcacacaaattgacccaaaatattaaactaaaaattcgacgaaactaacaacattaacaaattaacaaaaccaacaaaaatagcataaccaaagaacactcctccccctcatacttaagcaacacattg

SEQ ID NO: 35045 - DNA, 255 bp, Glycine max
agcttggaatgtagtcatacctcacagaatatatatatttatgtttaggtagtgaaaataccttatatatgcatgtatgtaacaaaaaaatacttcacgaaatatatatatgtatgtttaggtagaaagataccttggatatgcatgtatgtagcaaaaatacttcacaaaatatatatatgtatgcctaggaagcaatataccttgcatactcatgtatgtaacaaaaagatatgtcacaagatatatatatat

SEQ ID NO: 35046 - DNA, 180 bp, Glycine max
  unsure at all n locations
tccacttattagtgcacagctccttcaagaatttagcatatcttgtaatttgctntattgcatccagcagaggtatgtttacctgtacttttctaagtatttgcaagatctctntctctgcctcttccatttttttgttggaaactgcttttggaagaatggaacaggaaggatgtgctg

SEQ ID NO: 35047 - DNA, 371 bp, Glycine max
  unsure at all n locations
agcttgtacatctctgtttctctacctttcatcacanaccctggtggttgagtgacaaaaacttcttcttctagtgagccattaagaaatgcagattttacatccatttggtgtacttcccagcaattgaagctagccattgctattacaagtttcactgtttccaacctagcaacaggggcaaatacttcatcataaaccagaccttgcttttgcaaaaatccctttgcaaccagtctggctttgaactttgttacttctcctctacgattcaacttagttgtgtagacccattctactgctatggctttctttcctattagtagctatgtgagactccatgtcttggttctctcaatagacctcaactc

SEQ ID NO: 35048 - DNA, 367 bp, Glycine max
tatcgattcatactatgtaccctcggtggtgcacattgcgtttttcgcatatatattctcgacttgtttactctttataccccctgttgacgtgcttaagccagtttgcttaagtcatatctcgcttaacttaaaaataaaatcaattttcaccgaacgcttgaattgtattatgcgctaacttcggttatgatgaattccgaccagtcggtcgtgcgagtaccacgttggaaatcaataaagatgtataatatagtatgatcatcacaacaacatcttttagtaaaataaagcggaagatcaatcggacgttatctctatgagattcctcattcttcatccgaatgattaataactaaagtgaaac

SEQ ID NO: 35049 - DNA, 229 bp, Glycine max
agcttattcacaaatgtgttgattggtttccataatctagatagaggatcgataaacaaaactatggagattagtgtatcttataattacctcaacagtggccatttggaatgcaaagagggaaagtcataatatgatgaagtatgaactatgaaggaaagctcggaattaaagacagtggttgtgactttacctctagttgaaagaggttatttatatatgatactat

SEQ ID NO: 35050 - DNA, 480 bp, Glycine max
  unsure at all n locations
ntgaacttgtatcgctgcattacggacctatgcttactctgcttgatgtctcatgacacacttgatttacaatctctgcgttcatagtggctggaaatacttatgccgatcctttaggaatgagtccacgtataagaacagaattgcgtacgtgctctagctgtttgtgacctaatagaatccatggcatgatctagtgatggattacactcttatggcatgggatctctagactgtaaactctctttggttaaaggctccgtacgcacctcatgctctctatgcactatagactttctcgataacacttataangaatgagtaaacactatacacatgtttctggagccttgtatcaagatcgaggtttacgcatgtcgttaccagtatactgacatgagatgctcactattgtatagatgtccgataaatgtgatactattatgacacttgagacgtttttacagttgcgagagtttn

SEQ ID NO: 35051 - DNA, 435 bp, Glycine max
agcttgagctcactgttgctgctccataaagctccacggaatttgtctcggccatgctcttccttacgagtcctcttcgtttcttgttccaaggctttggtggtagcttcatttatatctctcagttcggcattctcctttcggatcttcagagctgctaatttgaacctctctttgactatttgggcttgctcgagttttgccctaagggcctgcacctcttcgtcttcctccgatgcctccacttcctcccttttaacggttctcaaactcgggagccaatccaaaccttgcacgtgggctttcaaccacttacggtagccaccgatgggcccattgttactacccctgagttctttgtccttcttttgcaccacctcccatgcctggcggaccttctgaagtgtttccacgtcagttctattgaaacctcgt

SEQ ID NO: 35052 - DNA, 419 bp, Glycine max
  unsure at all n locations
nngcatattttttctactcttctgttnngtaatttaattttcctttgttttccaacattaanataattaagaaatatattctttgttatgaataatcttttggtgaatgttcatatctatcgttatcttttttttgttatctttatttgcattaatttttttaactctctcnattacctttgtatctataaatatattactcatctttaaatgagaatacacaattctcattctttctaaactctccttttctctaatttttttttctctattattttcctccaattacattatatttaanagttatcaacacgatcgtcttttattcatttagcatattttctcattaacatctcgacttgttagaaaaaaccttgtagacaattntatcanaaaggtaatattttcacattcatgtt

SEQ ID NO: 35053 - DNA, 440 bp, Glycine max
  unsure at all n locations
agcttcatgatgaatcaacaatgattcanaagtgttttgatgataagaatgatgacaacaaaagatgatgacaaagaggatgaacaaaaatgtcaaaagatcaaagaacaactcaagtgaatcaaagaacaactcaagtgaatcaaagaacatctcaagtggatcaagaacaagtcaagagtccaagaatcaagaagaattcaagactcaagaagaaagcctacaatcaagaatcaagattcaagaataaagaaaggactcaatcaagataagtattaaaaagtttttcaaaactttgaatagcacatgagtttttgacaaaacctttaccacagagtctttactctctggtaatcgattaccatattgctgtaatcaattaccagtagcacaatgagtttgaanaagttntcatactgaatttacaacattccaattat

SEQ ID NO: 35054 - DNA, 259 bp, Glycine max
tgcttgtggagcttctatggaggttggatctttgagcttcaatgacgtccttcaatggtgatttttcaccatggagatgcagcggaaggcaaaggagaagaggagaggggaggcaccatccactacggaataatccaaggaagaaggagcttcaccaccaagaattgccttggataaaaagcttgatgacgatgctttaatggaggaaaagaaagagagaaggggggagcacgacattgatcgaataaaagatggaaag

SEQ ID NO: 35055 - DNA, 406 bp, Glycine max
  unsure at all n locations
agcttgagatgatgaagtgttgaagggtgaaacttcctacttttattgttgaccacagagtggtacctggagatatgtcgcggaggtcatgagaccttgtggacgtcaggtggggtgctattgcctaaaaccaagcttgaccaatcccgacccaacccgagcatagttggtcagtgagaacctgtgatgtacctaagcaggcgagctcctggaagtcaacagataaaaggaacaaagaccacaaagcaagggggcttgtggtggctggccagctgtgaattntgtgtgatatatgattatggcctctggtaatcgattaccaacggtgggtaatcgaatacaaggcttaanattgaagacaggaggctaagatggtctctggtaatcgattaccacggggtggaat

SEQ ID NO: 35056 - DNA, 382 bp, Glycine max
  unsure at all n locations
ntatacaagggagcaaaagatacaagtatcattcaaggtaagctatttggtcaaaagagcttgtgtctatacaattcatggccttcatcatgttctgagttatacaaatcattctataattcctaagctagttttaaaagttgtctatcctatggttgaccaaaataacaaagataaggatcatgaggaacttatttggatcgctgatacaattgacctaatgtagatgttggattagatgagagagagagagagagagatgatatggtttatgcagaattctccaactgtccctacactcagcacttgtcattgtgctgaagttacacttaaccaatgctttttcgacgctcccgcttagcgaacgctttgctaagtggga

SEQ ID NO: 35057 - DNA, 405 bp, Glycine max
  unsure at all n locations
agcttgagagttgagacatatgtcatgtgtcaaccttgctctagacttctaattatattgctccctcactttttctgaggtaggacaaacaaatgcttagatgtatgggttagggttattgttaggatataaagagaagggaaagttagtggcgaaccgcaaacatgaaaagagaagaaggtacaacgctacttgaaagaggttatcgaaataggctaatttttaaaagaaattttgtaactaatcttttacattgattcttaaaaaaatctgataaaaaaaatcagggaagtgtttgatgcgtgtccagttgtttggagaagtgtctgtggcgtgtccaagcccaaaangataattggcactgcaaaatgtgccacacaatgtccgcatgtgtctatgagtgtc

SEQ ID NO: 35058 - DNA, 434 bp, Glycine max
  unsure at all n locations
nttgtgtgaaaggatgtgactcttcacatttgaatatgaatttcaacgttcaaaggcactggtaatcgattaccaaaacattgtaatcgattacagctttttgaaaataattggaacgttgcaaattcaatttgaaaactttttcaaaacaattttgctactagtaatcgattacaacaatctggtaatcgattactagagagtaaaaactctntggtaaaaggttntgtcaaaaactcatgtgctattcaaagttttgaaaaactttttaatacttatcttgattgagtcttctcttcattcttgaatcttgagtcttgaatcttgatcttgattcttgagatcttgaaccttgaatcttgattcttgtctctagactttcttcttgagtcttgaattcttcttgattcttatcttgaactcttgaattgttc

SEQ ID NO: 35059 - DNA, 158 bp, Glycine max
tagctattgctgtagacaggatatgatatgcaatccgggatatatctacctcaaaggtacatgatgcctgagccagtcatcccatttaacccatgcacatttatcttgatcagtgtctccaccaacaacgaacctactctggataacccccgagtgga

SEQ ID NO: 35060 - DNA, 332 bp, Glycine max
atatgctccgttgttgtacataataatacaaggttttatactactagaaaagggaaatcactacgatcaatatattggttgattgattagatgtcaaacgactccattgccgtcactccaaaatcgttaagtgactcaaatccacattacgtacactttgacggagtgcctcacaagatattacaatagactggatgagggctcatgagtgatcacagtctgtcacaaagagacaagcgatctgagatgtccacagagaaagaaccagctaacaaataatccaatcagactctctttgcaggaatgggaaagaatgtctgagcattacacaa

SEQ ID NO: 35061 - DNA, 419 bp, Glycine max
  unsure at all n locations
agctntangagaaaccataaaaactaaggtagttcctaaacaaaaatcaattgaggaagcttcgccaagtatccccattgaaaaacctttattcaaacctttcaaagttagtgagaaggctaaacgaaaaattagggaacttagaaaaactaaatccttaactgaaggcgtaggtgacaatcatagtgaattactaaacaagatcggtagtttacttaaggtcattccagatactccccaagcctcggaaaatacttcccaaatggtaacaagaagtacctccaaattaattaatgttattaatgaagatagtgactaanactcagataccacaactgagatagggtcaatgtcagaaaagaatataaatccaattaattccaaacactgganaacaccctnncaaatatattatcaac

SEQ ID NO: 35062 - DNA, 277 bp, Glycine max
  unsure at all n locations
ntgtggttactgtatcctaattgccacatctgtctataacagtctatataactgctgtataagtattaaggattgaaggttcattacattgtacaattcaggatcaagtttgtttatcaacctttatcatgaaaatctgtgtttgttcattgacatgctacttgattgcttactgtacaagattctctcgaggatgctcatacaactgattgtttgcangtctcttttggtggaggtattggtgcctcgcatgttcatacaataggtctcagcttta

SEQ ID NO: 35063 - DNA, 442 bp, Glycine max
  unsure at all n locations
agctntntggttntaaatgaaagggttttctctttatctattattttattcaagctatgccacatgtctccatttgagtggagcaagaagggcccactttccctttttaattgtgactcatactcagccacaaacagtgagaaaaatctgacctttgaaacgctaaaatcctgcctcggtttgcatgccgtttctctggttccagttcctcgcgtttctctgcgtccgtcggggccagttttcgaaagcaagcaatatatatatcaaaacgctcagaataaaaccccgagcgtggntcagaggttggtttcgttaaattctaagtcgcacggcaaacgatgaattttnactaattaattaagaaataacccataacctcccagttatggattttctcttcttaattagcctaacccgcgtatcttgcccncactactcctat

SEQ ID NO: 35064 - DNA, 377 bp, Glycine max
tgaatgagagcactaacaacatttccttctcttttgccaatgttgacacttcattatggacacagccatggttgcttcaatactttatattcacgtgaatcccaatatatataccaattgacgcggattccttctgaacgggaacggacgtttcagagcatcaccgaactgttcaagagtgacatcagcatctgcctcgatgaacatgacccgcttgagagtctatctcagataggatcttactctcgccattattggggatattagctacagatatgtcgtgtgactcatggaagatgtgcagcgctattgtataaacatggaatcgacaatatccacatgtgtggataaaaatcttggacgcccaccagatccta

SEQ ID NO: 35065 - DNA, 407 bp, Glycine max
agcttgtctcattgtttatgcgagacagagaccaacatgttagccatcgtcagcaagtaccaagaagaattaaatctagccacggcccacaagtacaaagtggtgaacgagtatgcccgagtgtatgcggaaaaggaggctagaggaagggtgatcgactcgttacatcaagaggaaacaatgtggatggaccgatttgctcttactttgaacgggagtaaagaacttccccaattgctagccacggctaaagcaatggcggacacctactccgcccccaagcttctcagctcgtgctagggactcttccaattcagcacttgtacaacctagagcgcccgcgcccatccagagggaggccccccaagctccggctccaaccctgactcactcggccagcaacgccc

SEQ ID NO: 35066 - DNA, 440 bp, Glycine max
tgaaggtgtgtagcccaccatcttttcatagtagaatactggtaatgtgtctactatcattggtattatttttttctccgtcattgaggtgccacttgagctgccaggactctccacctttgggcgtattcttttgaaagattcgtgccccccttttgcacatgttctgtagttgcatcctatctgaagacattatactgacactgcctaacgaaggcaaccactaggtccttccaagaatggactcgggaaggttccaagttagtgtaccaggtaacagctaccccagtaagactttcttggaaggaatgtataagcaattcctcatcttttgcgtatgcctccatcttctgataatacatctttagatggttcttggagcaagtagtccccttgtacttgtcaaagtccagcaccttgaatatgggaggagtgatgat

SEQ ID NO: 35067 - DNA, 443 bp, Glycine max
  unsure at all n locations
agcttgtgactcatagttgtgctaagccatattctgcccctcctgngcaatatgacaaccattttgggggatagaggaccggtggattcaagcccactagtggacgacttcacccaactggtgggagttctcagccagttaacaaggtgtcttaatctgttggtagaagtggtggtggtcctgctactgtgtctacaccactccggtgtgggaagtgtggtcagcttggccatattgctcattagtgcatagatagagaggtgacttactttaactgccaaggtatgggccacattagcaccggttgcccaaaaattgatcttctagggattcctacacatgtntattctaatccccgagcacaagtaactcatcctttatcttgatgtagtcgctcaagtgttctctattagcaatggtgacatttctggtgctctagagct

SEQ ID NO: 35068 - DNA, 436 bp, Glycine max
  unsure at all n locations
nttgtgaatgtatgtatacatgantttgatgatgccaaagataatcgtcttctcaagtttgatccaagtcaagaattcagaaattcataaaataactccccagagtcacaactcttcagaaaataactcctgagagtcacatctgttcaagagatttttgaatggacatcaaaggcctataaataggtgacttgngacacaaaatgaatgagagagattccaagagaacttcattctcaaatgctctctcaaaagaaactcttgggcaaacacttgcaaatccattaagagttcatccatggacttcaattgtaatatccttctcttcaagagagaattcatcttctttcttcttatacaaagagattgattaagggaccgagggtctcttaagttgtaaggattcctgaacacaagggatgggtngtccctgtgt

SEQ ID NO: 35069 - DNA, 442 bp, Glycine max
  unsure at all n locations
agcttcaggttgctcattgactccagattgctgcanagaaggatagagatctgtatggtgatctacagaagaacatagaccacagactcttgcaataggtgcagattttttattcatggcaagttgagttactaggttgaccaaggcatcaagttttccctcaagctttttattttcagtagatgaagatgaatccgtggccacctcatagactcctctaaggacaatagcatcatttcttgcactgaattgttggcagttggaagtcatcttctcaatcaaattcctagcctcaacaggagtcatatcaccaagggctccaccactggcagcatcaatcatactcctttccatgtagctaagtccctcatagaaatattgtagaacgagttgctcagaaatatggtggtgaggacaacttgcacacaatttcttgaatctt

SEQ ID NO: 35070 - DNA, 449 bp, Glycine max
  unsure at all n locations
ntcatctagccaagattatacaaaggtgttacaaaaggacctaccgattcctaattatatgggccatcaaatctatcatgtgttgacagtaattgattagcccatgaatctcctcggnggcagtacacacttcggccatggcttttgctttggctaatagacgcgggaggtcttgactcccattcaaggtcaaggcgaatctatccatccacatagtcgcttcttgatgcagcgcatcaatcaccctccctcttgcttctttntcagcatacacttgtgcaaaatcctccactagcttttgttcatgggccatggactagttcaattcttccttgtatcgccctatgatagccaacatgctttgctccgtggcttcaagtgttgagccaaactccttttggacttgcgcaagcaactaactcttcttttaagatcatgccatgcacccg

SEQ ID NO: 35071 - DNA, 304 bp, Glycine max
agcttgtgctatcctcaccatataagctggtttcatggggttgagtttggccctaagctcaaattcttgtagcttatttgaaataacatgtgcaaaggtttgggactttgttatttgtttaatatgccagagtacataagacaaaagaaaagttaatgttttatctgacaagcgtttcctgtgcattatgtatgtagaatacagatgatgctcaagattcttaccataaatgcatctcctatgtttggcctatggtgctatactgtgagtagtatttagatgttagtataggcccacagtagat

SEQ ID NO: 35072 - DNA, 459 bp, Glycine max
  unsure at all n locations
cgtgagcaggctcttattgtgccacaaacctagtgtaacantttctatgtcgtatatgtcggacaaggcatgaatggaatgtacatgatgtattgcagcttggaccaacctatcgtctagcattgacacctcagccgagtgtatcaaatgacatattgagagctcacttgaagtctgtctagcacgcctgataggctatcaccgataagaagatttctctaaatactatgaattaaatggagaattggctagaattcccttcccacccacacctcatggactatggtntnggtattgattacccaatacattgtaatgtgaaaaccatacataactaccgcgcgctagattttgctctcatcgaggtatacatccacgctttctcatatcattatggagctccctgtgaatattggacatatacagagctgtgcgggccagacctatatatttatctgc

SEQ ID NO: 35073 - DNA, 197 bp, Glycine max
agcttgatatgatgaattgctgaacggtgaaacttcctgcttatattggcgaccacagagtggtacctgtagatatgtctcggaggtcacgagaccttgtggacgtcaggaggtgtgctattgcccaaaaccaagcttgaccaatgccgacccaacccgggcatactcggtcagtgagaacctgtgatgtacctaat

SEQ ID NO: 35074 - DNA, 301 bp, Glycine max
gtgtctatacaattcatgaccttcatcatgttctgaggtatacaacacactctagagactcaagaattatgccgagatcattattcacagatagtcattcactcacagagtaaggtcaaactctcaccgagttttgggtcaagctcttctttcacaactagtctatctagtgactaaccattctattataagctcacactcttgctctttctttgtgtaacatacacatttgctcaactcatgaaaagaaacaccaactaccttccaatcatgcactccattctaaataaagacatacacc

SEQ ID NO: 35075 - DNA, 419 bp, Glycine max
agcttttccttggatgaaagtgatgagtcatccataccaagagcagatagtggtgaatccaattcatcaagttcatcatcactggtatataactttttgagcacaaatgacccagttcttagtgaagttttgtttcccacttcttgtagcttgcccacaaccgaagaagctggaggtggtgcatagagcgtgaaaccagcaggacatggaaagcttgtaatggccccttcaccatcctgaatatcctaaaataagaaaatccaataaaacaatccttatgtggacatagaatgtagacattgcaataatcaactcctacaccacagttcttatgagtcacgagacatgctagcaacaccctctccgatattctcttttagacattcttttactatagttctaacattattagaaagtac

SEQ ID NO: 35076 - DNA, 448 bp, Glycine max
tcaccagtctgatccgtcagtgacagttgttaatcacactactatgtactctcttatactgtgctctttctccttgctctttctcctttcctgtaaggttgtcaaactcaagagttgggtaaactcatggagaaaagtaaacatgaatctaattttgtagaagtttacatgcattaaaaattcatttaggaaatatatcttagtacccaaacataattaaatggcatatccataatcgatattgaatattcaacataataaagcaaacaaaagtaatgaaatgaaaaacatatctcaattctggaaactgttatattatactagtccagtgaaagataaaaaaaaacataaaattagcttcataaactaaaatagaacaaaaggaaaaaaaaatgaaagataaaaaacataaaattagctgcataaacttaatacaactcacagaata

SEQ ID NO: 35077 - DNA, 371 bp, Glycine max
  unsure at all n locations
agcttattattatgtttattctaagttatgtttgattntctattttttttaaagtatttattataatgttatatttacaacaattaaaaaaattaacagataaataaatttatcatatttcttttacttttaaaactaaaattttaattttaatcttttaaagacaaacttgtccaacactaaaacataagaagaaaatagttattaaaaaataaaaatgaaagatctttactcctgattcaatgattcgggtcttacccgcgtgaatcctgattctgaatctggaacagctgctcccgtccgatcggcatgtaatgttctatcatgaatcactcactgacatgtatcttatcattcgtgctactattatc

SEQ ID NO: 35078 - DNA, 297 bp, Glycine max
  unsure at all n locations
tgnaaatcgactaacagtagcaccggtaatagttntcttttgtgccaaactaatttgaaattcctagtacttcatgaaaatgaatttaattcctgtaagattgagacaggtttgattgcaattttcaataataaactcttatctgatgcaaacttattgaatgctgtttaaataagatgccttgccaacagggttggagaaaaacagtagttttaagattggacaagctaggatccacgttgggccttagctttagtgaagcccttcatactgggaattgaacaggactgtcgtgga

SEQ ID NO: 35079 - DNA, 442 bp, Glycine max
  unsure at all n locations
agcttaacttcatcaattatcttcataattccnctcgctcaagcactcaagatgacttgctttagtgaggcatgtcaatgtttcttgggtttgattctgacttggcttgcttaagcacatagtatgcaacacttaagcgagaagagcttggtttcttcaataacttttcctgctaaaactccacaaaaacatcaaaaaagtcctaaaaaaacctaaaattctagagttccaatgtgattattcaaaattcaccccaatcttaaggtaaaacaaggctccatgtattagaaatgttccataatcacctacaatcatatgtaaaattaaagtatatttgacgattaccaactatcanagtatttgtcatttattaatagtactaattattacaaattatacttanaatgcatgatgttataaagacaaatctctacaaaaaata

SEQ ID NO: 35080 - DNA, 368 bp, Glycine max
tgtgcaaatcaaatcacccatacatttggtctctaacatgcattgtgtgtcggtcatcgagctttgacacgggaaaccggaaggtacatatcaccttgttaaatggacacatggagcactgcagacccgaatgctcaagttagaatagataaactttctgtctctcgagttcgcacaagggattcatatgctgctctacataagctatgcttcataccttcatagcggacgtatcctacctttgatcgctatcataatctacactcacattttgcttgaggaatagagttatcttgcaaatgcgtcttgcagagcatgtgatacgcctcattgcataccattcgcactcatgtgtgatcatacttgcg

SEQ ID NO: 35081 - DNA, 420 bp, Glycine max
  unsure at all n locations
tatctnttcacatagcttacggtaagatctgngacctagccttggtagaggtctccacagaggccattgcctccctcgcccaatattatgaccagccgttgaggtgcttcacctttggggacttccagttatcacccacggtggaagagtttgaagaaatcccaggatgccctctgggaggaaggaaaccatacctcttctagggattctatccctctttagctagaatttctaagatagtccaaaactcgacgcgggaattagaccacagaaagcaagtcaaaaatggtgtggttggagtaccaaggaaatgtttggaagcaaaagcaagagtcttggcaggtaaaggcaaatgggccctgttcatggacatcctcgcacttttgatcttcggaggggtcctcctttcaaatgtggatg

SEQ ID NO: 35082 - DNA, 395 bp, Glycine max
tctccgccaattgtctataaatagggggagaagtgaagtgaatttggttcattcccttaggcacttctctctctttcgaatatgcttggaaaaattgtttccgtgaagaaaatccaagctgaggcgctttcgaaatgtttccgtaatgtttccgtgaggaatttcgcgaaggtttcaaccgttcttcgacgttcttcatcgttcttcgatcttcaacgggtaagtacctcgaaccaagcttttcgattcattctatgtacccgtggcggtccacattgtgtttcgtgtatctctattctcgtttatttactttttatacccccttttgacgtgcttaagccattttatttaagtcatttcctcggcttacctaaatataagataaatttccatcg

SEQ ID NO: 35083 - DNA, 343 bp, Glycine max
tagctttgtatgtgatttttgcatatctttatatatttctcattgaggatttgaataagaaactgtttagaggtgtagcaactcaagtttttgaagaagttggtttttgatgaggtattacaatctttgtggtaaagtggtatagggtttttcatctttaccaccactgttctttcgtctaattgaaaattgcatttcaacacaaggaccataggggcgtgagttgctatgcattttccacagttaaaccccacagagctactacatgagcatgtagcgtgtcttcacctaacaggattatggaattgttgggttgatcatatgagctattgcattatacatg

SEQ ID NO: 35084 - DNA, 434 bp, Glycine max
  unsure at all n locations
tccactctgcttcactgcatcagctcgaatatttataatgttgataacaccttaccattcgccttgatacaaggaaaccacatcatgctattgtgctacatctcaaatgatgtgaagcactatgttcccacccattggaggcacccttaatggacgcccacatcaagaggtatgccaagcctgaagtatattagcaaggaaatacaggaatgattggctgctggccaaaaagacacacatgacacaccttctctcggacatccaattttggccaacctataaccatattattatctactaacatattcatacttttgaaaantaagcgaccaaacctgcgatgcgtaagacagctgcatcggctgatctttgcagccattacacatagtactttcgttgccctactgctcggctgaatggtgtatctcctcccc

SEQ ID NO: 35085 - DNA, 385 bp, Glycine max
  unsure at all n locations
agcttgctctagacccttgaggtaatatgcatcaagctagtgacattaaagaagcacttactgggaggcaacccaactctctttttccttattttattaatcattgcatatagtcaggtttcaacttgtttgtgattgttagagtaggtcatcaacctgttttttatgatcaaggggttgttaaagcttctctaaagttgtggatgaggaataacttagaaaatttttcagtcatccactcactcagcgcgccctgtgtgctaagcgaatcatccttcatgcactgagcgagtcatcactcgcgctaagcgcaccaaccccaaaccattggctgaaggggcctcactaagcgagaccaccgccctgagcccanaacctctatgga

SEQ ID NO: 35086 - DNA, 220 bp, Glycine max
tccatcataatggggtgtgtctcaacctacccttcagagggatttcgacgcagcgcttacagctgtgctttccaagtgaagaaggcgcgcgaagttgccaccaactattattcgacgaaaatgtgcactaaactggaacgtgcggtatatgaactttaataatgtaacgatcggtacaacgcgttcatccacggcgaagatattatcaccccacacatct

SEQ ID NO: 35087 - DNA, 412 bp, Glycine max
  unsure at all n locations
agctntgctctaactgcaacagcagagccactagaagatcctccaggaacccggtctggtgcacaaggatttctaggtgtgccataatgtatattctctccatttatactggcagattggaatacttagttacgtgagtaacagaaataaggtgttcaaaacatacacatgtctgattacacataaataccaacactcatagtcacattttccatacggagaagaaagctccaccaaagtgagctaaactgagcaagtatccatttaattattaaagtgcatcgtggtcttaccacagctaaatttaagggtggaaacacccttatgcaaatactttagagacaaaaataatcattgaggagccttggactttctatataggctactgactgactgatagatatattacttc

SEQ ID NO: 35088 - DNA, 494 bp, Glycine max
  unsure at all n locations
aaagtgcatatgnctccgactcaatgcatggtctcgatagatcttatgcgattgcacataccagccagggcgtcgaaataatatagtcatctgtgatatgcataaattacttgtcacacagcatttgcactcgtagaagggctcaatatgagagtgatactctgtttcacactaacaatctctagttctatgcaatgtatacctcatttattaggcacagttatctgagagaaaaaatcgtcccaccacgtcttcgcagaactggtaggtccagaacatagtgagcgtgcataacagtcactgaataataatacacatgaatatctccgtatgtgaatagcttattcttaccaacatgatgtgttctcatctaagccaggaaccattatctctgaacgtgaaattgcaaatcttttgacacatctctttacttcatgtatataatgaaaatttcagcttctccattctctactttgatccagagtctatgtgcg

SEQ ID NO: 35089 - DNA, 434 bp, Glycine max
  unsure at all n locations
agctntgagtctattcaatctacaataccttttgactcggatgtcggattgagtcacgtaatatctcgagacactcggaattgaataccgaagttatgagcaaattcaatcgacaataaatttttactcggatgtcggattgagtcacgtaatatatcgagacgctcgaaattgaataccgaagctctgagcaaattcaaacgacaataactttttactcggatgtccgattgagtcccgtaatatatcgagacgctcgatattgaataccgaagctctgagcaaatcgaaacgacaataaatttttacacggatgtcggattgagtcacgtaatatgtcgagacgctcgagatagaatacctgaactctgagcaaattcagacgacaatacctattgactcggatgtcggattgagtcacgtaatatcttcga

SEQ ID NO: 35090 - DNA, 409 bp, Glycine max
  unsure at all n locations
tcaacattcactgtctagcgtctggatatattacgggactaaatcanacaaccttgtaaaaagttattgtcgttcgaatttgccctgagctacatcattcaattacgagcgtctcgatatattacgggactcaatcacacatccgagtaaaaccttattgtcgatcgaatatgctcagagattcaacattcaattctcagtgactcgatatgttgcatgactcaatcatacatacgagtaaaaagttattgttgaacgaatttgctgagagcttcaacattcaattccgagcatgtcgatatataatgggactcaatcagacatccgagtaaaaagtatttgtcggtcgagttcgctcacagatacacattcaatttcaagcgctcgatctatgatgcgattcatcata

SEQ ID NO: 35091 - DNA, 445 bp, Glycine max
  unsure at all n locations
agcttcaatatatattccaaactcccttccaaaatctgatttcaggcttaaataggtggctttgttcgagcttgcgcgcttagcgtaactctgaaccgcttagcgcgcattagtgaatttcggcttagcgcgtgcttttctcgctcagcagatggactgaagcggagtgcttaccgggatgacccttcgctcaacgatcatgcacagttcatcctttttccagattcttcctcgtgctcagtcgaggagtgttgcgctcagcggatggctcgctatgccaatcttctggcttagcgagagggtgaaaattagcacttcacaaacttgcctaattaacctganattgagagaaaataattattaaacacactaaatgaaagtactaagtatttactacctatctttaacaaanattaattgcaacactacagaataaccataaatt

SEQ ID NO: 35092 - DNA, 383 bp, Glycine max
  unsure at all n locations
tatgaaagatatcagtctaatgctcataatcagaatattcagaatcaccagcaacagaatgctcacaatgctcagaatactcagaatgctcaaaatgatcaggatgcacactatgcctaactaatctatgaaaggttatatctatttcatgatcaaagggttgtaactcacctggattgcccctagtcattcactatatgcagcaaatcatgtatttttcatactagcaccacgggtaaaaagggggttaagctacgggtaaaactacaactatactcaaacgatatctagacgatctganaattcgtgagcaacacccaaaaatcatgaaaagatagcacaaaaattctcagacaataattcaaagtctaactatgaaaact

SEQ ID NO: 35093 - DNA, 323 bp, Glycine max
  unsure at all n locations
ggcttatacctttgaggtaatacgcaatcgggtagagtacattgtgtaaacgcttactgtgagagctaccaactcttatttttgctcattggattaatcattgcatatgcacttgtgatcctatgtctgtgatagtatcacaatggcgttaaccagtggtttatgagcgaagaagtgagtgagcttctattgatattaagaggccgcatatctttattaattctcttgtcatacacacacttactctcttatgnacacattatactacactctgcatgcactagacgagttataagtctctatgctctcatcatctctcttct

SEQ ID NO: 35094 - DNA, 261 bp, Glycine max
agcttatcttttctttaaagaaaactttaattagatacattttccgaatagctcttaaaaaattgaacaaattgttaattttttaacagaatattgaaagggaaaaaatttaagttagtaactgaacttttagggaaaattattagatgactcagaaattacacatctattgataaaacatgattcaaaacatcgatataccattggttgtgattaaaaaggaattacattacatttgtctatacatatcaactattctat

SEQ ID NO: 35095 - DNA, 185 bp, Glycine max
tgagagcgcataggcttctagacaagggatgtctcttattctatgcgagcgttatccagctgggctgcaataatatatcttcttgatatgataattaattttacgcgcataccagcgtgtatgccaatctatattaatctcttttacctacctttcattcacactaataaccccaaacacatact

SEQ ID NO: 35096 - DNA, 421 bp, Glycine max
  unsure at all n locations
agcttgtcatatggaaggataggataccctatgctttntggaagggcaacccaacagtgtctattattaggagagaactcggcaagtgcaacaccacagaaaaacatgattggaatgcaagaatatatgacatagtaaatatataatctaaaaatttacttttgttttaggttaatgcattaattatctcaagattaaattaacacattttttctctctctcttttcagcaatggttgcgagagagagcaagtaattttgagaactcaaaacttgaaaatcaatgtacctttaggtaaagttntgaagcatattttatgattctgatttttttaaataattattatagaaggggttagtttactcttttgaatctgtcacatataatcttttttagattgtacttactacattttgaaact

SEQ ID NO: 35097 - DNA, 301 bp, Glycine max
  unsure at all n locations
tatgcctgttatgatnttttggtttcggcgggtttctaattattaatatttttcaatttggtacttatagcttctgccgatggaagagctactggagagacgtcttactgaccctcgtttaccaatgtaagttttattgcgaagaaaaacttggttgaggcaatattgttcaatatgactatataaaggccacacatgatagtaaattatgttttttgatctattgggatttgggtcataccacagggaaacccatatccttcccattaatccatccttgcttcagatttgaacctggaat

SEQ ID NO: 35098 - DNA, 293 bp, Glycine max
agcttgctattatgttaagggactacaacaagaaaaataatgttagaaacttagaaaactagatagaataagataatatagtttaagagagcaaaaaaactcaccagaactataatgaagataatgagcgtcagaaatggtacggttaataacgatgtttgttgtcatggcggctatgacaaaattgagggcaagagatattatcttgagttaagaaaatggtttgctgcgttgaaactatgatggtgggtgcacatagaaatatatgatgagagaatgcttatattatttca

SEQ ID NO: 35099 - DNA, 601 bp, Glycine max
  unsure at all n locations
cctctctcccnctcctctctactccgtagtgatattatctgactgccactctcactgttgtgcctctcatacntcannnnncctccacacgcgcnnatttgttgcattcatagcacgtgcgcgacactanaatcactctagcatgtgcgcacgtcgatgctcgagggtgacgaggtcgagtgtcctttgtgaggacatagagagtgcaaatcgcaatcacgaggcgacgactatagaagcgaaggactatgaatactgtgtggtgacgaagattgataacattgagagttgtattcctttcatacattatgacatataacgagaagtgcgactgacgagcgaccgattcaacttatgcgacatgacgaatggcgcgtggcaccaggagactaactactcacataatagactatgccgagtgaatctccacgtataaagacgacatactacattctgcactgatgacacacatattaacactcccggacacctgcctacttctcatgaaactaaattcaacgctcatgtgtcatacctcgacgcctatgttagcctgccgacaataccctcattgattcgatccctccactccctctacacg

SEQ ID NO: 35100 - DNA, 366 bp, Glycine max
  unsure at all n locations
ttacttgaatgtgtgtaacccaccatatgtccataaaaggagatgtgctacgggcgaaattgaggccccttcaaagtgttntgcaagggtataccaccaactgcttgcccttcagtggcatatccgatgcaaggctcgaagtcggctagactgtggtggggaatttcatgtgtctcccccatgggttgagagacatgtacatgatgagggtgtcggctctcaatgagtatgggagcagagttattgacatcctcattgggagtgtacgccacattgggtggtgtatagttgggaggcaagccatatggcgggaaagtgtgctccgtttgaaattgcacaatatggagtcggacgtactgtctaaat

SEQ ID NO: 35101 - DNA, 436 bp, Glycine max
  unsure at all n locations
cttntgtttcctgaatggacggngtcagccaccacaaccatcattattatagtcatgatgagaagagcgcatcactgtatctactgatctcagaaaggactcatcctacttagctcgcactgttaaccacttgttctgcattaattcaaaattgattctgcagacatagccttgcttcaagattaactcaagatcaagcctggccttaaaacaaagtgctttcaagacatgcaaggctctggtaatcgattaccaagcagtgtaatcgattaccagaagacagggttgagatatagctcgtgaaaagggttttgaatttgaattctcaacatgtaatcgattaccatatgtttgtaatcgattaccagtggagagttttcaaaatagtcatgacacttcatattataactgggtaatcgattacacacacattgta

SEQ ID NO: 35102 - DNA, 333 bp, Glycine max
tatctttattctaacagaataatccgataatgtcatatatttcggtgttgattaagcataacaagactttgtgtgattggtttaaagatacaatctttgcagatgagaatgcttcaaaaacattatgaaagctagcagatgggcctaaaagaaatgttataacctggcgaggatacgacatacacaggtattcattttacacgaaagcacaagatgacggaagtacaatgcagaacagcggggtcaccctatgggctgaatctcaacactttgcaagtgtcaatgacgccaatccctgtgtagcttacatcccttactttgagttcattgatg

SEQ ID NO: 35103 - DNA, 316 bp, Glycine max
actagaaagactctgatagaagatgcttaaaggggatttgaaacacttcaagcatcataaaatcaataaatacagagaaataagtatttaaaataagaagcatacagctgagcctaagtccttggacaatgcttccatccttgaaaacaactcttgatctagtatcttgagtacttaagtcaaggtacacagacttgataaataagtttagtataggcacacatccaaaagtcgaattcatatgttatctagaatcctggatattttcaccatttactagataatgaaatgctagcatgatatacaatatcactat

SEQ ID NO: 35104 - DNA, 430 bp, Glycine max
  unsure at all n locations
agcttatagattatataataagagaacaatgacaattaaagaatcgattcatgtttcctttgatgagtctaatgttatttctccaagaaaggatattttagatgatatttcagaatctttagaacaaatgcatattcatggagaagattataaaggaaaaggagaatgaagcaatgaagatactccagtagaagtcaaagcaaataatgatcttccaagagagtggaaagcttcaagagatcattcccttgacaacattattggtgatatctcaaaaggggtaacaactagacactctctcanagatttatgtaataacatggcttttgtatctatgattgaacctanaaatttanatgaagccataatagatgaaaattggataatagctatgcaggaagactanaccaatttgaaagaaataatgttt

SEQ ID NO: 35105 - DNA, 448 bp, Glycine max
  unsure at all n locations
taagctgagaatgtttgtganatacatgcagtanaatacaatttatgtgcatcataattctaacctgctccactcacaacaggtttagcatcaatgataatatttttaagctcaatactaagaaaactctgnaagaagaaacttaaaggggatttgaaacacttcaagcatcataaaatcaataaatacagaaaaataagtttttaaaataagaagcataaagctgagcctaagtccttggacaatgcttccatccttgaaaacaactcttgatctagtatcttgagtacttaagtcaaggtacacagacttgataaataagtttagtatatgcacacatccanaagtcgaattcatatgttatctanaaatcctggatatntttcaccaattcactagatagatgtaaatgcatagcatgatagtaagtatatcactatttccatgt

SEQ ID NO: 35106 - DNA, 439 bp, Glycine max
  unsure at all n locations
agcttggggctagagctatcaaatgtccctttataggatatccacctggaatcaaggggtacaagttgtggaggatagaaccgagttaaccaaagtgcatcaccatcaaagatgtaatctttgatgaaactagaatggctatcaaggctaaggatcaacaatagactatcagtcaaggcaacaacttagaaattactaacgttgaggtggagctaccagcatggggtgttcaagtcaaggaaacaaataatgatcaacaacttgaacctatagttaatgattacaacttggctagagataaagttagaagatacatagtgcctcctgagaggtgtaacagccgcgccttttttttntttttttaggttttcctattaattaattaattatcaaataaataaataaataaaatcaggtacgtcataagtttcccactata

SEQ ID NO: 35107 - DNA, 454 bp, Glycine max
  unsure at all n locations
cttctccccaattntctataaatagggggagaagtgaagtgaatattggttcagccccttaggcacttctctctctttcgaatttgcttggaaaaattgtttccgtgaagaaaatctaagtcgaggcgcttccgaaacgtttccgtaacgtttccgtaaggaatttcgcgaaggtttcgaccgttctttgacgttcttcattcgttcttcatcgttcttcgatcttcaacgggtaagtacctcgaaccaagcttttcgattcattctatgtacccgtggtggtccacattgtgtttcgtgtatttttattctcgctttatttactttctatacccncttttgacgtgcttaagccattttatttaagtcatttctcgcttaaactataaataaaataaatttccatcgatcgtttgaattgtattattccgtaacttctggtaaaatgaattcc

SEQ ID NO: 35108 - DNA, 442 bp, Glycine max
agcttatccatagtggcattccttatatcaccaaaatctcaactcaatcacctttagagtcctactgaatcaataaaaagtaacttgtagcaatttggtgagtaattcaacactatatataataactacatctgcctgtgaaatttttagaaacatatacatatcttacatgaacttaatcttaattctaggatgtgtcgagtactatgtactcatttatgaaagatgaaaaattcactcatgttaatttggaagggattatagaatgcaagattgtttacaatcacgggaggaagactgcaaagattggttctggatggaagtcttttgcaaattcacaaaatttagaacttgcccaggaaattatatgtgagttcccagaatccaaatctaactgtggtctattctagattagtttggaatttaagtgcattatactcta

SEQ ID NO: 35109 - DNA, 417 bp, Glycine max
  unsure at all n locations
tctcaagcaagcttccatcaagtgatatcagagcacaagagcttctttatgtgctccttacacctccattaatctccattgttgcttcttcatttttctccatgtattttctcacatgtcttgtgttgaatgttgttaacgtgattctttagaatttccaccaattaaacttgctatagaagctagatttgatttcctatggttaaaatttcttgttcttgttctaaatccatgaattgtgttgagtttaggttcctttgagttntgtcttgctattcttttgtggctgaaactcaaaccataaaattcttacaaaaacattaaagtagaagataaactcanaaatctagagtgacatgttcacctattgtagttttgtcatagaagtcatgatacttgtcacataagattccttat

SEQ ID NO: 35110 - DNA, 380 bp, Glycine max
  unsure at all n locations
tatagtctcacgaatgccatatcttgatgcaataattgttattctttgccataccagacattattgctaacagagtcggacatgccataactcaatcgtgctntttcttcaatgtcatatgtagcaaagtccttgatcctgccaagttagatgagctacaaaatgaggctaccaatacattgtgtcagatggagatgtattttcctcctgtgttcttccgcattgtggttcacttaattgttcatctggtgagggaaattaaatgttatggtctctgttatttgtggtggatgtacccgattgaacaatactagaagatcttaaaatggtatacaaagaatctacaccgttttgaagcatctattgtgggaaggtacatt

SEQ ID NO: 35111 - DNA, 375 bp, Glycine max
agctttatatcctttgcagtaccaaacacataaaccatagtgtgctgaactcggtgcatacatgaaccttgatagaaaactagtagataacatcaaatctagtctagatgcattcaactaaagagagtacacaaccagactattatactgaggaacatcagccttttcatcgccatcattcttggagagtatttcatttacaacaagaggagttgtagcgagatgacaactctgatacctgaattgtttttaacaaagcataggcataatttctgtgagagaaagataccatcatcaagctgatccacttccattcccaatatatacaccatcacgtccagaattatcatttcgaacacttgcagcatgctcttc

SEQ ID NO: 35112 - DNA, 401 bp, Glycine max
  unsure at all n locations
tgagatatcacaggangccgctacagatgctactattgctgcgtgattacacacttgagcccgcttaaaggtaagggatgagtttatcgcaattgctgttaaaataaacatgtgtgtatgcatcttcagaggattacatcggggtttctttttgtatgcctactgaactatatttttcctttacgatcataaatacaatattgttgtgtttgacggaccaattgatgtcctgatgtgaattggttgataaacctgagagctcttagtgttgtcatgtttctgacctactgatttgatgcattgattctaatatgattgtgtggaattatttgacgtgtctactctccatgctgtgtgaaacattttgtataaatatttatatcgagattatgaaatgatga

SEQ ID NO: 35113 - DNA, 377 bp, Glycine max
ataagatggccgaaggactacaccgtctagactgggaaaaccctgacgttacccatcttaatcaccttgcaggacatccccctttggccagctggcgtaataccgaagaggcccgcaccgatcgcccttcccaacagttgcgcagcctgaatggcaaatggcgcctgatgcggaatattctccttacgcatctgtgcggaattcacaccgcatatgtggcactctacagacaatctgctctgatgccggatagttaagccagccccgacacctgcaacacccggtgacgcgacacactttcgttcctaccaaataaaagctcgataagtactccctccgtaaaatacatcgttcgtattcgatctcccagtcaaccg

SEQ ID NO: 35114 - DNA, 121 bp, Glycine max
agctttctattggatgatagtagtctaataagtttatgccatagtacgtcgtactacgcttggattttaaagaatgaccactctgctagctgattaaagcacacaggtgcacagtaatttg

SEQ ID NO: 35115 - DNA, 257 bp, Glycine max
  unsure at all n locations
agctttacatcagattttagtaatgacccactaacctagaattaaaataacttaatgccattaacctanggaattaaaaaaacttaatggctgagtgtaactgaaattgtggcaaccaaaagtcacccccaacagccaacaagtcagtcaccatttggtcttccaaaaggctgatgcctaggttggcaattgggcccttattacaacttgaactacacctaactaaagcccttttagttgattaacccaaaacatat

SEQ ID NO: 35116 - DNA, 162 bp, Glycine max
  unsure at all n locations
ntaactcggatgnncgattcaggcgcataatatatcgatacatttgatattgaataacagaagctctcgagagattcgaatggtcttaactgttcacaccgatgtccgattcgggcgcagagtatagaagagacgctcgaaattgatcaacggaagctctcg

SEQ ID NO: 35117 - DNA, 440 bp, Glycine max
  unsure at all n locations
agcttgagcttggttcaaccccgtaatccaaggaatggaaattctgatcgccaatacttcaacaacatctcatagggatgaatgactcgggcatactttaagcttatgcacggaaaatgtaattatgaaattgagatgcccgaagaaacaccatttcctagttaaccatgcattangtaccatgttcaattattttgtttttaagtgaaacgggtttatgatcccaacatggttggctcctaacacatgaaactaagaatgtagtgtgaagtttcacgcttcccccttctttgtttttgttttgtagaggaaaacgcaaggatgagcaaacatganaacaaatggtatgcaattntgcagatcanaaagtttggtgaacgcatatgcatgatgatgccatgactcatgcanaatggtgaggctggaatatgataacggac

SEQ ID NO: 35118 - DNA, 280 bp, Glycine max
  unsure at all n locations
taagacatctctctatggacttaaacatgcaccgatgcaatggtatggtttacttanaaacttccttcttgaacaaaaatttgagagaggaaaagttgataaaacacatttcattaaaaagatctctcataacattttactcatgtaagtttatatggatgacatcatttttggttctactaatcgatctctttgtgaagattttgtacacaagatgcacgaggagtttgaaatgccaataatggggggggggattatattactttcttggtctctatgt

SEQ ID NO: 35119 - DNA, 419 bp, Glycine max
  unsure at all n locations
tatctcttcgattcattctatgtacccgaggcggtccacattatgttttgtgtatttctattctcgcttcatttactttttataccccctcttgacgtgcttaagccattttatttaagtcatttctcgcttaacctaacaataaaataaatttccaccgaacgttggaattgtattatccgttaacttcgtttaaaatgaattccgaccgttcggtcgtgccgtaaccacgttggaaatcacaaggagataaaataatagtataataacacaaatataccttttagtaaaataaagcggaaaaatcaatcggacattttctctttgggatatctcattgttaattgaatagactaataactaacgtgaaactaaagctanaatcaactcgcctactcaagctcgtccacgaaaatacg

SEQ ID NO: 35120 - DNA, 365 bp, Glycine max
  unsure at all n locations
nttaatttcaatgcaaggaagcatgacttatgcctatgaatctatatatttggttttgaatgtaaaagggcatgaatattaagacatgtgtgagaggttcttattagaatctacatttggctgccccatgaggaataccttacacctaggtagcatggaaaataccttccaacagtatgtatagatgtgaatatangtagcgcgaaaatacctttcaacggtatgtaaagatgtgaatatatggcataaaaataccttgcaaagtgtgaatgaatagcaaaaaatgcctttcacaatatgtatatttgtggataggtagcataaggatcctttcaaaaaaatgtacccatgtcaaaaatggcatg

SEQ ID NO: 35121 - DNA, 446 bp, Glycine max
agcttgaaggcaaactggatgcattggttaacttggtaacccagctggccttgaatcagaaatctgtacctgtcgcaagggtttgtggtttgtgctcctctgctgaccaccatacagacctttgcccttccatgcagaaacctggagcaattgagcagcctgaagcttatgctgcaaatatttacaatagacctcctcaacctcagtagcaaaatcaaccacagcagagcaattatgacctctccagcaacagatacaaccctggatggaggaatcacgctaatctcagatggtccagccctcagcaacaacaacagcagcctgcttcttccttccaaaatgctactggcccaagcagaccatacattcctccactaatccaacaacagcaacaaccccagaaacagccaacagttgaggcccctccacaactttccctcgaagaa

SEQ ID NO: 35122 - DNA, 414 bp, Glycine max
  unsure at all n locations
ctntggagtagaaacctgggaccaactcattntatttcaaaatggaagtcatatctagtcaaggtctgagagaccatacaagtttcctaacgatttctaattatgtgggccattaagtctatcatatgctgacaatagccgagaagcccatgaatctcttcgggggcggagtaggtgtctgccatcgccttggccttggctaacaatcggggaagttcttgactcccgttcaaggtaagagcaaaccgatccatccacatggttgcctcttggtgtaaagagtcgatcacccttcctctagcctctttttccgcatatacttgggcatactcatccacgattctatgctcgtgggccgtggctagaccgcactcttcttcgtacttggcgatgatagctaacatgttggtctct

SEQ ID NO: 35123 - DNA, 303 bp, Glycine max
agcttgcttgtagagcttctatggaggctagatctttgagcttcaatgaggtcctttaatggtgattttccaccatggagatgcagcggaagacaaaggagaagaggtgagaggaggcgccatccactatggaataagccatggaagaaagagcttcaccaccaagatgagccttggataagaagcttggagagggtgcttcaatggaggaaaagaaagagggagagaaagagagaggtgggaacacgaaattgaacgaagaaaatgggagagaacgttgagtcgcgtctcataagactctca

SEQ ID NO: 35124 - DNA, 316 bp, Glycine max
tgtgctccaacatcaaatgtgcaataccaaagcactcactttctttgcttttgtaacaacaacaatatatgtagaagaattcttcatcaaagacttgtacatgtcaaccttgtagaatgtgagtccaacttccttgagacctaactggtaaaccattaacctttgaaaagaaagttcagctatacacacctctgaagccttaactctttaaccaagtctgattgatgtgctttggttgaatcatctctttcttggcataaatgtacttgtatgacgcctcacattgttccttagaaaataaacgatttgccttatg

SEQ ID NO: 35125 - DNA, 243 bp, Glycine max
agcttctgttttcaatgtcgagtttcacgatatactacgggacactatcggacatccgagtaaaaagttattgtcattttaattttctcggagcttcagttttcaattacgagcggctcgatttattacgggactgaatcagacatccgaggaaaacatttttgtcgttagaattcgctcagagcttttgttttcaatatcaagctgctcgttatattgcgagacttaatcatgcatctgagt

SEQ ID NO: 35126 - DNA, 338 bp, Glycine max
  unsure at all n locations
tgtagcanattcaaacaggaaataaattttactcggatgtctcattatgtcccgtaatatatcgagatgcttgaaattgaaaacggaagctcgtagcaaatgcaaaacacaataactttttactcggatgttcgattgtgtctcgtagtatatcgagacgctcgttattcaaaacagaacctcgtatcaaattcaaacgacaataactatttactcgaatgtttgattgtgtcccatagtatatcgacacgcttgcaattgaaaacagaagctcttagaaaattttaacgacaataactttttactctgatgtccgattgggacccgaatatatcgag

SEQ ID NO: 35127 - DNA, 249 bp, Glycine max
  unsure at all n locations
agcttanggatggaatacttacttgttggtgatgaacaaaagcgcgaaacggaatcaaaaaatgcgaaaaaggatgaccctagggctgcaaactcgtaaaccccgtgggtatggcttttgaaaggggggaaaagaagtttttgaatgcaaaaacgtcccccctttcgtcacttttatattttggtgcagaggtggctcgcccaggcgagctcagctcgcccaagcgagctaacctgcactttttttttt

SEQ ID NO: 35128 - DNA, 214 bp, Glycine max
tctatcacgtgtgtgtgtgtgtgtgtgtgtatcatgagggtgtgtcattctgtgatgagggtgtgtatcatcagcgtgtgtgtgtgtctatgatgagtgtctgtgcgtgttatgagggtgtgtgcgtgatgagtgtaagtgtgtgtatcatcagcatgtgtgtgtatgatgagtgtatgtgtgcgtatcatctagctgtgtgcgtgcctgtctg

SEQ ID NO: 35129 - DNA, 265 bp, Glycine max
  unsure at all n locations
agcttccttctatgattagagaaagtcaaagatattagtaagtgttctgattggaatatagtgttactttacctctcttaagagtgaacgattcttgcgtactataagagtgtacgagattatagagaaactcgaagcaggatgatcagagatacgacatcttcttactgaccatgctttaggnaccaagacaaatagagcagtcctatcatctcaacagtgctcgatatctatggagatcgtataagtcaagaagactattttg

SEQ ID NO: 35130 - DNA, 221 bp, Glycine max
tgagaattacatgacgagaacaagacttatgttgcggcttgtcatgatatgaggacaaaagacaagaggtggccttaatagggatcaagagagaaataacgaacagactatgtgacatcaaaatgtctcttttttctgtgctgactgctcacactgaggactcaagatgaatctggtacctcttatatggagagtgactgtgaccacattctcatcatgcc

SEQ ID NO: 35131 - DNA, 376 bp, Glycine max
agcttatggctccaaagtacatcttaaactaaattcacaagagacttattctaatgattgaaatcggactttagtgtcataacaacctatgctattaaaattaaaactaacacttcacaatgcttaaatatgcttaaaaataaatcatattgccagcccatagctggcacattgatattccacttggatcatacgtatcctggactcttctttctcacttttgagatgaactagtacgtgttgatcaatttttcaaacatctctttggctatcttagctcttaccttgttgttaagccccttatccaaactgggttcttcctctaccaagctctacatttttccctcgaacgctatgacaccctacattctattat

SEQ ID NO: 35132 - DNA, 367 bp, Glycine max
tgatgactaccctcttatgtgaacaatacgggtatttacgatcttgttacatgaatatggcacagccattagaaataacgctaggttagtagccaatggatacaatcatgaagaggggatagattatgaggaaacatatgctcctgttgctagattataagccataacagagatattagccgttgcatccataatggaatctaaactttatcaaacggatggaaagagggcctttgtgagacgcttatcccagaggacgtatatgtctatcaaccccctggctttgaaaactcagatatgcctaatcatgtctttatattgaaaagggctttatatggtatacaacaagcctctagggcttggtatg

SEQ ID NO: 35133 - DNA, 333 bp, Glycine max
agctttgatgatgcagtgagaggagttgatggtgtctttcatatggcgtcccctgtgcttattccttatgatgagaacgttcaggtatcttgccctttatcccccactgttagtatttttgtctttatctcaggggcttccttacaagaaaataaggagggtaaatagagaaaaaatggacactcaaaagtcaaaacttgttttcttttacttgatttgactctgtagctcatttacaaatgtactacctacgttaatgtttatattacggcatgataccattgaaacgtgactcgtataagtattaagtacttgaatcctgatgaatcaact

SEQ ID NO: 35134 - DNA, 291 bp, Glycine max
tattgtatgcatgcttgtggtttgatcacccattggtgtgtgctattaggaacttgatagagtaggactagatagctgtagtgctagacatagtgtgcagggttctagttttcattatcctgtgcttataatgttggttaaattaagctaagttcaacaagaaacatttgcggatgaagcttaatttaaattagtccaaacgcacgagacatcggtgttggtattttggcctcagcatagaacacatgaattatgtcaaatagaaacaaaccctaattgcatcaagtatct

SEQ ID NO: 35135 - DNA, 415 bp, Glycine max
  unsure at all n locations
agcttgcacattgctgcttgatagaagaagagcaagacggtaaatcatggtactttgacatcaagcggtacgtagagtataaggagtatccacagggggcttctgacaatgacaagaggacattgtgaaggttggcaactagtttctttttaagcggaggtatcctatacaaatgaaatcatgatatggttttgctctgatgtgtagacactaaagaagccgagcgaatgctcatggaggtacatgaagggtcctttgngatgcatgctaatgtgcatgtcatggctaggatgattctaagggcagactatcactggctcaccatggaaaatgactgttgcatccatgtgaggaaatgccacaagtgccaggcattcgcgaacaatgtgaatgctccgcctatgcctttgaacat

SEQ ID NO: 35136 - DNA, 383 bp, Glycine max
  unsure at all n locations
tcttagtttcacatgatgcagatgggttngtagctacctcatgcactcctctaatgactatggcatcatttctggcgctaaactgctgcgagttggaagccatcttctcaattaaattcctggcttcagtaggagtcatgtttccaagggctccaccactggcagcatctatcatacttctctccatattactgagtccttcataaaaatattggagaagaagctgttctgaaatctgatggtgggggcaactggcacatagtttcttaaatctctcccagtactcatacaggctctctccactgagttgtctaatacctgagatatccttcctgatggttgtggtcctggaaacaaggataaatctttctaagaatactctc

SEQ ID NO: 35137 - DNA, 440 bp, Glycine max
agcttctcctataacacagtatcatcagcatattgaagaacattcacaggaactttgttcttccccaccaaaaaacttctgaacctattctgggaaactgcttctctcatcaaccctgtcaatccctcagccactaaatcaaagaggagaggtgccaaggggtcaccttgtctcaatcctctttgaggattaaattctgaagttgggctgccattaacaagaacagaaatggaagccgaattaaggcaggcccttatccatctaatccatctctcatggaaccccattctcttcagcatataaatgagaaattgccaagatacagaatcatatgccttctcacagtccaccttaaaaaccatacaagacttctcggatcttctagcctgctcaatcacttcattagccaccagaactccatgaagcaattgtctaccctg

SEQ ID NO: 35138 - DNA, 435 bp, Glycine max
  unsure at all n locations
ntcataagtgaaatcaggtgcagccatctccctaagagtcctctcacgaggtggaggttgagccatgttctcagcaaaatcagaatattcagaatcgccctcaacagaatgctcaaaatgcacagaatgactaggatgcacactatgcctaactaatctatgaaaggttctatctatttcaggatcaaagggttgtaaatcacctggattgcccctagtcatgcactatatgcagcaaataatgtgtttctaaacaagcacctaacaaggggtaaaactataactatactcaaatgatatcaaaatgagctgaaattctgtgaggaaaaccctaaaatcatgaaaagagagcacacaaattttcaaataaaaattcagagtctaactatgaaaactacctaagagaagtttagaagaataggacaataatacttg

SEQ ID NO: 35139 - DNA, 434 bp, Glycine max
  unsure at all n locations
agcttgtatgattatggngtacccatcacatgtggtactaggtggcggtcgggcgatggtgcacaacaagttttccacatccacaaatcgcgcataaacccgccatcccctgttgcccacctccaactgagctcatgtactcccacgtagcccatatcctcatttctctcaacaccgggtccccatcaatcctctcaagcttccccaacatccaagtaaaacaacattcaaacagcacaaactatcacagccaagaaaacagagcaaaggcagaaaactctgccaaaacaccaaccaaaatcacagcttttctcacttanagaccccagtaacaattccttcgttccaatttgttaaccgttggatcgactccaaaattntactggaagtctctagtacataaccctacattntgaccgttgngatctactagc

SEQ ID NO: 35140 - DNA, 436 bp, Glycine max
tcaccaccaacagagtgtcttggataagaatcttacggaggaagcttcaatggaggaagagaatgagagagagagagagagagaaagtggcgtgggaatgaaggaaagatagggagagaagttgaactttgaagtttgtctcacgagactctctttcctcaaagttaccacaagtgttacacatgcttctatttatagcctatgtagcttccttgagaagctagcgttacacccctctaatagctaagctcacctccatgccaaaatacatgaaggaagagagctttcttgagaagcttccttgcggagcaagtgttacacctcttcaatagttaagctcacccccatgggaacacacacccctccaatagctaagctccccccgcccccagatacatgataatacaaaacaagttcctactacaaagactactca

SEQ ID NO: 35141 - DNA, 417 bp, Glycine max
  unsure at all n locations
agcttgataatggaagacacatgaacagctctaggcaataacattcatggggctccgaanaatggtgagaatggaggattgccttgagggtcctcacttangcaatcatgaaacacaactccaaactcgaaagtggaggacacatgaccagccctaagcaataacattcatgtggctccgaaaaagggtgagaatggaggattgccttgagggtcctcacttangcaatcatggaacacagctccaaactcgaaaatggaggacacgtgaacaaccctaagcaatagcattcatgtggctccgaanaagggtgagaatggaggattgccttgagggtcctcacttangcaatcatganacacaactccaaactcgaaaatggaggacacatgaacagccctaagcaataacattcat

SEQ ID NO: 35142 - DNA, 339 bp, Glycine max
tatccttatggcaactcccgccttatgacgactattccgggctagacgatgaggaaggagatacccatctcggccccctgcttcacctcaaagatctgtgcccacatgaactaccccaaccgaacatagtgcgccatataccgacctcacccacacccgtaaaagaatctgttcccttcgcggaagataagggaaagattgaagcgctcgaagagaggttaagagcagtcgagggccttggcaattacccattctcgtatttagcggatttatgtctcgtgcccaatatcgtcattcctcccaagttcaaagtaccagacattgataagtacaaaggga

SEQ ID NO: 35143 - DNA, 223 bp, Glycine max
  unsure at all n locations
agcttctacaggatcttccgcgtgatccaacggaagaaggttntgtaggatcttccgcgcgatctancggaatgatgatgtttttcgtggataccgatgatgatcctgtactatgctatcccttaggcactatattgctaatgtggcataacatgcggatgcctatactctatggttacgttgattgtagtgactcgctttgtccgtcatatacatattcatc

SEQ ID NO: 35144 - DNA, 339 bp, Glycine max
  unsure at all n locations
gtttacaaagcgtcgatgccaagtgtatactgtttttatttcatgntacaattgtacgcagcttgtgtctccttcatagagagggcatgcacgatggcctttaacactgcattcattcaaattcctatatgctagaaagtcattaatggtgcccaataacattgcacacaacttgaatgatcaatttggatagccatcaaacacaacaatgcactcatactacaactttgtcaagtacttaatcaagggaccgagataaacaccaatatcatatcctcggctgtcttgcggctgatagcatcattgacaacatcatgtatatttgttgcatgcgcaacc

SEQ ID NO: 35145 - DNA, 352 bp, Glycine max
agcttgctcgagcatgtatcaacttataccaatgtgtatgagttacggacaaagcttgaatctttgattcaaaagaagacgccaaggaataaagctcatcttgtgagacgcttggtcaaggtggagtacatgggtggttagaacatgattgaacatcttaaaaccttcaaatgtattgttaatcaattaaagaagatagatatgaatatagattatgaactacaaactcttctactcctcaattctctgcctgagagttaggacacattggttgtcactctcaacaactctaaactagatggaaagcttagcatggataatgtcacagatagtttgctaaatgaagagtcta

SEQ ID NO: 35146 - DNA, 456 bp, Glycine max
  unsure at all n locations
tgtttagtgcaggtgctgaatctcgcgcttaacacctgctacttacttagtgcgtgctgcgcatttagcgatggcaacgatgtgcgcactaaacacgtgttgatcgctgagcgcgctgctaggttgggctggatgatgtaatcttaattcttctttgtaattagctgtactaaatgctcttacttcctaaaatagatatatatgcaaccagtatttaaaaaaatatcaatacttaacaatgtacaccaaataactactatataattatttttagagataattntattgtattattctattatccacagcataattatttagtagatatcacatcgttggcttgagattattgcatttacattagttaccttgagataaaatatactcatgttaattacattgatttagagatcccaacaagtntgggaaaagcagaaaattatggatcctaatata

SEQ ID NO: 35147 - DNA, 189 bp, Glycine max
agcttaagaatttaaccaagccgaggtatcctatggtaacatcccactttttttaccatttcaatgatctaagaacactacccaatcacataacaaaacaataacatcgtctatcacacgcacatagaaaattgggatttacaacaaatgcacccatggatcaaatccatttgtttcccctacccccct

SEQ ID NO: 35148 - DNA, 455 bp, Glycine max
  unsure at all n locations
gtcactttntaggtactcgatgcagcaattgagttcattcactttaccttctctgntagatgcgtggtttctctttccagtgaacgttagccaagaagtagcccaaaaattccattagttatattggtgtgaaatgttttgtagactgtggatagaaattaaatgctttgaatatcatatgaatgtagcgctatgttctatgaaggccaccttttggatttcctcccacttcatctctacgtgcttggtggtgttgatattcaagaaactaagaaagttcttgaatttggggaatcaaataatattaaaaattaagagttgttgtagaaattaggactgatttattaaaacaaaattagtggcccttacaaaaatcatatttccatgtgcaacaatattcaatattgtagcctcttatctgtaggtacactgtaatggatatccaactaatatat

SEQ ID NO: 35149 - DNA, 449 bp, Glycine max
agcttgcatggattaatagcaacaaatacagagtaattgttgaagaggataaattgatcgtaataataaaacctcaaagagagttgtgcttgatcctcaagagaaaacaacgttggatacttagccttccattaatcagtagaaaacgaaattgcagattgaagcagaaaacgaaattttattgctaggtgaatagtaaaaactggaattgcaaaacctaaaattattctttctccccaaaacgaaaagagagctctaaaactaaaaccttggtgctgttatataggttctcagccccaaagcttacaaatctattttaagtccaagcccataaataaaataaaatctgggcaagataagataagatttgataaaatacaatctagatgaagtagaatctagataagataagataagataaaatctagatgacataatatctagatgag

SEQ ID NO: 35150 - DNA, 352 bp, Glycine max
agcccaccatgtttacatcgtagaacactggtgttgtgtctactatcattgtcatcattgatctctccgtcattgagagtgccacattctgctgccaagtatctccacctttgggcgtattcttacgaaagattcttgccccctttttgcacatgttctgtaggtgcatcctatccgaccatattatactgacactgcctaacgaaagccaccactaagtacttccaagaatggacttccgcaaagaaccaggtacagtaccaggatatagctgcccgaataagactttcttggaaggaatgtatcagcacttcctcatcttttgcgtaggcgcccatcttccgataataca

SEQ ID NO: 35151 - DNA, 438 bp, Glycine max
  unsure at all n locations
agcttgtagaatggttatacatgatatatgtcagggcttggtttggttcaaggataaaagggatgccccacattatttccatgacacaaatgcaaaaaatgatgatttggaaattttatgcaaaactggtcatgcatgcacctatgcagacgttcaagtgtcaaatttttatggtcatgtgatgctagggctcangattcatttcctctattttaaatcaacccaatgtttccaaaatatgttcttttatcaatttgtgcattcctccaagtccatttcgagcgtccggngaaattttcacagcattcacccttcaggtgtagacacgtcttttcttcanaaatcgattatgatcaatgaaattntntcanagaaaggttggaaatcatctcttttcacaagcatgtcggctnttagctagacaacttattttctctt

SEQ ID NO: 35152 - DNA, 418 bp, Glycine max
  unsure at all n locations
ntagtcaaacanaataatccanaaatgtcaatgaattgggtcttgatttagcataacaagactttctctgattggtttaaagatacaatctttgctgatgaaaatgcttcagaaacattaagaaagctagcagattggcctaaaaaaatgttataacttggcaaggatacgacataaacaactattccttttacacaaaagcacaagacgacaaaagtacaatgcaaaacagcagggtcaccgtaagggctaaatctcaacattntgcaagtatgcatgatgacaatccctgtgcagcttccatcccttactttgggttcattgatgaaatttgggagcttaactatgtcaaatttactgtatgtgttttcaaatgtaaatgggttgatagcaacaccggtgtgcagaccgatgatgt

SEQ ID NO: 35153 - DNA, 432 bp, Glycine max
  unsure at all n locations
agctntttggagtagaaacatgggaccaactcattntatttcaaaaaaaaaaagaaatcatatctagtcaaggtctgagagaccatacaagtttcctaacgatttctaattatgcgggccattaagtctatcatatgctgacaatagccgagaagcccatgaatctcttcgggggcggagtaggtgtctgccatcgccttggccttggctaacaatcggggaagttcttgactcccgttcaaggtaagagcaaaccgatccatccacatggttgcctcttggtgtaaagagtcgatcacccttcctctagcctctntttccgcatatacttgngcatactcatccgcgattctatgctcgtgggccgtggctagacccaactcttcttggacttggcgatgatagctaacatgttggtttctgtctcgcata

SEQ ID NO: 35154 - DNA, 330 bp, Glycine max
  unsure at all n locations
tgaatcggacatccgtgtganaagatatgaccatttgaattttgtgcgtctctatatgcgatgctcctgaatcggacatccgtgtgaaaagttatgaccatttgaatttctcaagagcttccgttgcacaatatcgagcctctcgtcatatgatgcgcccgaatcggacatctgtgcgagaagttatgaccattagaatttgacgagaactcacgatgagcaatatcaagcgttactatatgtgaggcgcctaaattggacattcgagttaaatgttatgaccattcgactgtctcaagagcttgcgctgatcaattttgagcgtgtcta

SEQ ID NO: 35155 - DNA, 329 bp, Glycine max
atcttatacttgatgatgatgatcccatgaggaatgtgctctctcggagactaaagctcaggatcattctaggactcgcaggaaggaagctcaatttgcgacacacggggtcaatgcgctatacactagtggctccaacgtgattgaacatctgtacagactaacaaggattggagactatggcttgaagaggatattgctatagcttaagcactgcgtactgttctactcctcaattctctgcctgagagtcacgacacattggttggcactctccacaactctaatctacatggaaagcttagcatggataatggcacagatagttt

SEQ ID NO: 35156 - DNA, 187 bp, Glycine max
  unsure at all n locations
tatactatgaaagtgaagtcgataactcttaatgttggagacttctttggaagttatcctgcccatggatagtaacgatcgagctttgggcaaatggtccccanattgggaaggaccgtttaaagtaattcagatctattctaatggtgcttatgaattagaggaattaacccctcacaaacgtact

SEQ ID NO: 35157 - DNA, 405 bp, Glycine max
  unsure at all n locations
agcttaccctcactattacccacaaccacccaccaaacctatcaatgttaagaaaatgacatcggcagaaatgcacttgagaagagaaaggggcctatgctttacttgtgatgacaagttttcccctagccatcgttgtcctaataagcaatattttgttccacagtgggaagaagaggatgaacctgcattacaaccagatccaccagacgaggttgagacagctggtgaccctagtttgcaagatcatcatttgtcttataatgctntanaaggctcatcaagtcttggaacaatgaagtttcaaggatcaatanatggattgcgagtgcagattctactagataatgggagttcagataatttccttcagcctagactatctcaatgcctgaagtacctata

SEQ ID NO: 35158 - DNA, 417 bp, Glycine max
  unsure at all n locations
tgtggattntagggattgagggcagttatggtttgtgtttatgtttgagtttgtgtttgaggcttgtgttttggaagaaaaactagaagacaaagttttgggtttaggtgtatgtttctcttcatagagtttggccaacgaaatttttctgaggagtcatgtangtgattgtgcaatgacatcccttctgatatcaggttttaatcctcccacaaagcaatccaatagagcttcttgtgtaattccttgtactcgattagctaaagccgcgaactgcacgtaatatgactgaactgaaccaattttagcgagtttaaacaactgagatctatgacattcatacggtgatgggccanattctgtctctaatgctcgcgtataagcaatccatgttctgaatgatatttcacgagtcat

SEQ ID NO: 35159 - DNA, 443 bp, Glycine max
  unsure at all n locations
agcttgtatgattatggggtacccatcacatgtggtactaggtggcggtcgggcgatggtgcacaacaagttttccacatccacaatgcgcgcataaacccaccatcccctgttgcccacctccaactgagctcacgtactcccacgtagcccatatcctcgtttctctcaacaccgggtccccatcaatcctcccaagcttccccaacatcaaagtaatacaacattcacacagcacaagctatcacagccaagcaaaacagggcaaaggcagaaaactctgctcataacaccaaccaaaatcacagcttttctcacttacagaccccagtaacaattccttcgatccaattcgntaaccgttggatcgaatcccaaaatttactggaagtctctagtgcataagcctacattntgaccgtngngatctactagcatacatc

SEQ ID NO: 35160 - DNA, 394 bp, Glycine max
  unsure at all n locations
ntacagcagattntagtaatgacccactaacctagaattaatataacttaatgccattaacctagggaattaaaaaaaacttaatggctgagtgtaactgaaattgtggcaaccaaaagtcacccccaacagccaacaagtcagccaccatttggtctcccaaaaggctgatgcctaggttgccaattgggcccttattacaacttgaactaaacctaactaaagcccttttagttgattaacccacaacatatttttggtcagccaactttacaaggattgggccattatttagacaaactaaatactctaaaattgagacaaagtggtggcatttagtcctcctccatttgggccatgatacaactcacaaccttggacttttctccttgaa

SEQ ID NO: 35161 - DNA, 379 bp, Glycine max
agctttcactctcgaagtctggttcaggcgcataatatatcgagacgctcgaaattgaacaacgaatgctctcaagaaattcaaatggtcaaaacttgtcacacggaggtctgattcaggcgcattatatatcgagacgcttgaaattgaacaacgaatgctctcgagaaattcaaatggtcataacttgtcacacggaggtccgattcatgcgcataatatatcgagacgctcgaaattgaacaacgaatgttgtcgagaaattcatatggtcataactagtcacacggatgtccgattcatgcgcataatatatctagacgctcgaaattgatacacgaatgctctcgagatattcaaatggtcataactttgtcca

SEQ ID NO: 35162 - DNA, 339 bp, Glycine max
  unsure at all n locations
tctcgatatattatgcacatgaatcagacttccgtttgataagttatgaccatttgaatttctcgagagcattcgttgttcaattntgagcgtctcgatatattatgcaccagaatcggacttccgtgtgactagttatgaccatttgaatttctcgagagcattcgttgttcaatttcgagcgtctggatatattatgcgcctgaatcagacctccgtgtgacaagttatgaccatttgaatctctcgagagctttcggtgttcaatttatagcgtctcgatatgtgatgcgcccgaaccgtacttccgttgacaagtgatgaccatttgaatttctc

SEQ ID NO: 35163 - DNA, 383 bp, Glycine max
  unsure at all n locations
agcttgaatgtgtgtaacccaccatttttccatagaagggttgtggttaggggcgaaattgaggcccctccaaagtgttttgcaagggtataccaccaactgcttgcccttcagtggcatatccgaggcaaggctcgaagtcggctagactgtggtggggaatttcatgtgtctcccccatgggttgagagacatgtacatgatgaggttgtcggctctcaatgagtatgggagcagagttattgacatcctcattgggagtgtacgccacattgngtggtgtatagttgggaggcaagccatatggcgggaaggtgtgctcgttttgaatntgcacatcatggggtcgtccgtacttcctaaatctttgcctaccatatctg

SEQ ID NO: 35164 - DNA, 450 bp, Glycine max
  unsure at all n locations
ntgatggtgtcgagaagacatcacatgtttgtcatcatcaaaaagggggagaatgtgaatgtatgtatacatgattttgatgatgccaaagaagaatcaaactaagttgcttcaaaggataagcatggctttaagattaatacaagattgattcaacaaacatagccttgcttcaagattaactcaagatcaagcctggccttaaaacaaagtgctttcaagacatgcaaggctctggtaatcgattaccaagcagtgtaatcgattaccagaagacagggttgagaaatagctgttgaaaagggttttgaatttgaattttcaacatgtaatcgattaccatatgtttgtaatcgattaccagtggagagttttcaaaaaagtcatgacacttcacattataactgtgtaatcgattacacaaacattgtaatcaattaccagtggaga

SEQ ID NO: 35165 - DNA, 358 bp, Glycine max
  unsure at all n locations
agcttatactctatggtggagacccaagaatggttnttttttcttcatcttttggttcttgacagttatcattgcttggtacatttggaaatgattatatttctctcttttcttcttacctaaaacacagtgaaaagaaagtgatacttttgtgattattagtgaaagtaaaatatggaaatagaaaattttcctcacagcaaatagacctttaattttttattttaagaaaagatgttggcaccttcaagtggaaattttctaatatataagactatttgccaagtaacatcagctacaaagaagacagacttttactttctggtagctctgaatttggttacttcttattcttctc

SEQ ID NO: 35166 - DNA, 346 bp, Glycine max
  unsure at all n locations
tgcctcanagaggtccaggaaggacaaggcggccgaaggaactagtttcgctccagagtacgacagtcaccgctttaggagcgttgtacaccagcagcgcttcgaggccatcaagggatggtcgtttctccgggagcgacgcgtccagctcatggacgatgagtatactgatttccaggaggaaatagggcgccggcggtgggcatcactggttactcccatggccaagttcgatccagaaatagtccttgagttttatgcccatggttggccaacagtggagggcgtgcgtgacatgagatcctgtgtaaggggtcagtggatcccgtttgatgccgacgctatc

SEQ ID NO: 35167 - DNA, 394 bp, Glycine max
atcttctaaactctatacaagaatgaagctctgataccacttgttagacaattggcctcagatatcttaagaaggggggttgaattaagatattgcaaactattttcccaattaaaattctatttcaatttcaatgcaagttacaaattcccttaaaaatgaactcttaaataatgattcacatcgaacaatctgaatataaatataaagcaataataaataaaagagtttaagggaagagaaagtgcaaactcggatttatattggttcggccacacccttgtgcctacgtccagtccccaagcaacccgcttgagaattccactatcttgtagaagcttttacaagttctgaacacacatagacagttcttcctttgagttcatacttcttt

SEQ ID NO: 35168 - DNA, 417 bp, Glycine max
  unsure at all n locations
gttgcaattggacattatttatctcaagcatacggacatctatcgctaaccttatttcactcaactgtaacaatgcttgatgatgataatgcccaagccttttgtgccagatttctgtgtgattctctatgagagagaaaacaacttgctcctccttcaatggatttagagcaaaactttttcctttcattnttaccttgaagatttcttgaccagctacatctttaattaagcaatatttgtcttccaatacaactttaaatcctcgttcaatcaattggccgacacttaataagatttggtcaattttcacaatgaataggacatcagcaatacatcttgtgcctgcagaacttgcgattgcaactgtcccctttcctttgactaggatatcatcaccattacaaattctgactt

SEQ ID NO: 35169 - DNA, 455 bp, Glycine max
agcttctagtcgtccatagacctcctctgtggttcggtctagcaaacgttgcatctgtgcattcatcgcatccactaacagacgttgagcgccgtccaactgatggtactcgtcaccaccaccacctgctccagccataattcaacaggaaaaaaaaaatgtgcaataaaaattattaaggtttcaggacctcacaacactctactcacgtctcttagatggtagtacactcgtgtttaatgctctcaataggcttttgtgtaatgtattccctcttgccttttaccactcgtgtttcctcttaagttcctggatggaccaaattagacacacaaggtaatataaaatagaaggaaagacaatataatgatcacaaacagatttgatttgcgataacaacttggacttgatttggataataatatattagatttggattcggataacaggtgagc

SEQ ID NO: 35170 - DNA, 435 bp, Glycine max
  unsure at all n locations
tccttaagaagattcctaaagaagctagagcttagctacactcacatctctaatagctaagctcacctccttgagatgagaagctagagcttagctacacaccccctataatagctaagctcacccccatgacaaanaaagatgaaaatacaaaaaaaaaaaagtccttactacaaagactactcaaaatgccccgaaatacaaggctaaaaccctatactactagaatggccaaaatacaaggcccaaacgaaggaaaaacctattctaatatttacaaagataagcgggctcatacttagcccttgggctcaaaatataccctaaggctcatgagaaccctagggccttcccttggatctctagcccaatctacttggagtcttctacccaatgcccttgcgggataggatggcatcaataactttcacatgg

SEQ ID NO: 35171 - DNA, 438 bp, Glycine max
  unsure at all n locations
agcttcagcgttgcctttgatcaagcgaagaatgggtggtgagcccattgtagagcaaaataatgatgaacaagctcttttagagtcagctctgactaaacttgttggagctgcaaaaatctacaacctaaggatagagaacttagtgtttcaacttcaatttttatcttcaaacttatctctagtgtctcttgttatcaatccttttgcgtcttatatgtctttaggagaaggcttaccagatgtaggctttattttggatgtatntaagttttttcctatacctatattaccaaggtgaaactccaaatctgactggagaacaataccaatagtacttatggtatgtgtctaagttttttcctatacctatatttctttgaaggagtggcactgattactttcttaattttgctttacaggtagaaacaactttgg

SEQ ID NO: 35172 - DNA, 442 bp, Glycine max
  unsure at all n locations
tgtagtgtacatgtctccttctaataaggaggatatgcctgtactttacaagtttcctagggctcttcattccaagacccttgtagacattcctttctctgagactctaagagtggattcgggtcatgagcatcctttattccaagacccttgtagacatgcctttctcactctgcttttctttcctttntcatgtaatatggctaagtacgattaccaatccatcaaaagaaaaaaaagttgtcaatgttgaagtggcagaagattgtgctcctcctcctcccatcaacactgagtccgacgagaggaaggatcttagtttttcttctcaagatgttacaaggaagaagcaaagagtggctactccatcatcgattatcgctcccttctccatcgagagccactcaatgttcctttctatgaaggagggtgagtattctca

SEQ ID NO: 35173 - DNA, 441 bp, Glycine max
agcttcatgctaagtgggtttttctgtgaattgacttaccagtcacgttataactgagctgatgatgaattcacaatcttctaaaagcctgattgatctgaaaaataatatcataacttttaaattttatgaaagtgcaaagctaattgggcgagtgtcaaagtttgatctcattaagaaatggatttctagaagacacgccacatcacatttgtatcgtattaaacaattaggtccgaaagaataatggttcaatttaaatactctcaagtgtccccgaacaatatcaaaacgttgatcctaatctatgttgaaaagacacccaaaaaagaacaaattacacatctacaaaagaagattatgttaaacacaagatatcacatatgatccaatctttcgccctttagttttgtataatttcgtttaagtgcgcacacatgc

SEQ ID NO: 35174 - DNA, 452 bp, Glycine max
  unsure at all n locations
tgtatttataaaatactagaatttctgtgtacattgaaagactttctaagttntgtgcaactaacaccaaataaaanaagattaccgctatttacactatcttttcttcttcttgaagttatactgctatatggagaccatggtccattgatgatctagagagtgtcttgtatgtgtgttatacatgtggatgaggatgttcctttactgtggttcacaaagtgacttctagcgccacttaaccaaagtgtgtgagtgtctctcctcaaataataccgaaacattgtgtatgatagcacacattatataaaaaaagttcttaaaaaaggtttgtcaccatgatttggatcacatcaagattctttaactgtctgtgtttgtaattggaactgcatcgatcacatttgtccatgaattgtcgggatatcaataaatgagatgatatcacaaca

SEQ ID NO: 35175 - DNA, 356 bp, Glycine max
tagctgatggcaatcagtaatactgagcatcttctaggacgtgttctcacatagccccgtaggcaattccaccatatctttgcattagtcaatactcatatcttctacaattggaagagcatctgatattagcacgttaacgttttcaaaagcctgtcttgtattacaaacgtgaacgtatgattttttaagattcttcttcatgactacgggaggatccgagatccgctctaatctcattcttcttacgctggatcatgagatcaccgactcaatattcttcatttcataacgatggaaaccactgacgtatgactatcacaacttttaggtcactcatttatttctacaacttt

SEQ ID NO: 35176 - DNA, 451 bp, Glycine max
  unsure at all n locations
ntntcgattcattctatgcgcccgtagtggtccacattgcgtttcttgcanttttattctcgntntgtttactttttatacccccctgttgacatgcttaagccattntacttaagtcatttctcgcttaacttagaaataaaataaatttccaccgaacgtttgaattgtattatccattaacttcggttaaaataaattccggccgttcggtcgtgccgtaaccacgttggaaatcaaaaagaggtaaaaataatataataatcaaaaagacatcttttagtaaaataaagcggaaaatcaatcggacgttttctctttgggatttctcattcttaatcgaattgggtaataactaaagtgaaactaaaggctaaaatcaattcgcctagtcaagctcgtccacaaaaataggctttttgaagtttgtcatctcaatttctcactaagt

SEQ ID NO: 35177 - DNA, 446 bp, Glycine max
agctctgcattccagggcgcacgattgatttgtatgctgaaatggtgccttggaagctcctgaggaaggatctcactacactatcccagacatggagtgtgtgatcatactccaacctcaccaccacttctcacatgtccgatctaaatatggacagggcgaggttagtctatgggctagtcataaagatggacatggacttgggctcgctcatatcaggccagatctgacagatggcccagaccaactcctcgcagctcggcttcccatctctcatcaccgccttatgcgtcgcccaaggagttatcttagactgcctcacattcgagtcctagagccctgccattaaattggcatacatacagaagaattgcttgaacatggatgatcccacaatcacttttccagggacccgtaaggcatgggctagagtatctgaggcctat

SEQ ID NO: 35178 - DNA, 294 bp, Glycine max
tggagcctcaatcacactatgtgcctgtgaggggcatttctctttccacatacattatttaacaaatcccaatggtgatgacgcgcataaatgatccccgagcccgatgttcaaaagtcaagatgtaccacgactagatgggcatcatataccaaatcatactattactaagacacgtttggatggatgcaggaaaaatatactgtctctcgagatgaagaacggaagccgaactcaataggaagagagaacataccgacgtatcatgagcgtaacaactgacctatcatatct

SEQ ID NO: 35179 - DNA, 227 bp, Glycine max
ctacttcatgcactcatctaacgacaatagcatcacttctggcactaaattgccgggagttggaagccatcttctcaattaaatttctggcttcagcaagggtcatgtgttcaagggctccaccactggtaacatctatcatacttctctccatgttgctgagtccttcataaaaatatcggacgagaagctgctcagatatctggtggtgagggaaactagcacat

SEQ ID NO: 35180 - DNA, 450 bp, Glycine max
  unsure at all n locations
tcaagacttagtcttcatgttgctacccctatctctaactatctcccactttntagctcggatgatgccaaacttgaattgccatttgagtgcatctggagagtcttaaaggtaaaggcttttcttagacaaacctgaaagtttcttaacactaagagaagcatcaattcatatcatcatcatcattaagtagagttatatatgaatgtatattctaatccaatgctaatgcaatttcttttttttttttctttatccccctacataatgctaatgcaatacactatgctaatgcaatgcactatgctaatgcaatttttctcccccttttggcacaacaaggccaaaaagttattactattcatagaatataaacaaacaagcatataatgcgaaaagggaaaatatcatggccttttattcatataagagccattacaacttagacat

SEQ ID NO: 35181 - DNA, 325 bp, Glycine max
atctgaggccaactataagtggtctttcggctagcacagtcggagcaccgttcaaccacttggagttatggaagatctactcgccaaagttaatggttccgttttccttgaacatttttacattttggatatggaagatgattcatctagatatggttctatattgatcctaaggagaccattcctcatgacagcccagaccaaaattgatgtgcatatacggacactttccatgtagtttggtgatgatgctgtgcagctcaacatctttgatgccatgaagcatccctcacaagaccactcactctttcttcttggatgttat

SEQ ID NO: 35182 - DNA, 451 bp, Glycine max
  unsure at all n locations
tctttgaganaacttccttgagaagctagagcttagctactcttacccctctcataactaagctcacctccttgagaagcttccttaagaagattcctaaagaagctagagcttagctacacatacctctctaatagctaagctcacctccttgagatgagaagctagagcttagctacacaccccctataatagccaagctcacccccatgacaaaaaacatgaaaatacaaaaaaaaagtccttactacaaagactactcaaaaggccccgaaatacaaaggctaaaaccctatactcctagaatgaccaaaatacaaggcccaaacgaaggaaaaacctattctaatatttacaaagataagcgagctcatacttagcccatgggctcgaaatctaccctaaggctcatgangaaccctagggccttccttggatctctagcccagtc

SEQ ID NO: 35183 - DNA, 431 bp, Glycine max
agcttattctgtgattgaatcaagaaaaagattttaaaataacaaaaatatggattaattttcttaactaataataaaaatatgcatttattatgtcatatatgtgagaagtagttatagaggtacctgaatatcaagaattgcttgccatggaaaaggaacaggagcatgtggattgtttaaaagaaagttgaacaatacaaaagtatccatgacaaagtaaaatgagaatagagagtcactgatacttgagatgactcactctatatatagtgagtcatgacatgaatttcaactatgcatttatctttcccatattaatgtaaatgaaagaaactacttttattgaactgtttcatgaaatttaaggaagtgtgtatcacataaaaaaatggctttaattgaggaacacaatttattgactttgaaaa

SEQ ID NO: 35184 - DNA, 446 bp, Glycine max
  unsure at all n locations
tcacaaagagaatacattntattaacatcgacattacactttttcagtacattgcaacaacttttgagaaagcctgccctagtttggtatgccaagtaggaaacaatacatctatgtcaaaattacatgtgacacctaattgcatgttttgtattgacaattatgaattatgataggaagatgaagttgaactacagggaaatttattaaacacgtacagtatgaacaaatggagaaattgcaatgtaaatatacaaattataaaggagaaagaagaaacaatggtgagagaaagaggaaaataaggtctatgagtttagagaaaccataatgaatgtactttnttctttttgcataacatggcatcagtatgaagtatccactatcggaagcaatgactaatctccgttatagatcataagtgacatgatatgggtattcttctc

SEQ ID NO: 35185 - DNA, 426 bp, Glycine max
  unsure at all n locations
agctntanaagattggctaagattttgttaaattataagcacttagacaatgaaggaaagctggagttgctgcacatgatgtccaacgttatgtcaaggaataagatcgggctgcacaatgcacaaggcaagataaaatgtctaatgaagaattgaagttgcaggatccacgatgtcggatacaatgtcctgacatcctgcccgaaaatactggagttgctgcacaatgcataagtcaagataaagtgtcaaatgaagcattgaagctgcaggatccacgatgtcggatacgatgtcctgacatcttgcccgaaaatactggacacataaatctgttatatctttaacagattattgtgcagttagcaagagattagatgatctatctttaggaacgaattaaaagatcattanagttcgaatttc

SEQ ID NO: 35186 - DNA, 446 bp, Glycine max
tggtttgaggtacttacccgttgaagactgaagaaaactattatcaaacgatgaatgttgaagaacggttgagaatcttcgcgtaattactcacgaaaacgttacggaagcgcctcggtttggattttcttcacggaaataattttcatcagcaatttcgagagaataagaagtgccaaaaaggttgaacccttttcttcttcactcctccccctatttatagcaaaataggggaggagcttgccacccagctcgcccaggcgagctcagctcacccaggcgagcaaggttgcttcctccagaagcaacaaccttctggaggaagaatctggaaggcccaagtgggccagattgctatttgtacccccactttttactaaacgcacccacttctactttcttggtaattctttcttcgtaacgttacgaaacttcacgaatttcgt

SEQ ID NO: 35187 - DNA, 429 bp, Glycine max
agctttgacggctattcctccttgtttttcttttgcctcttctgatattccaggcgtgagaagggctcactgacctcgttgagcgagtaagtgaagctctcgctcagtgccaaacttgcgctaagcctgcaaggtgacagatgactctctgagcgagctgatgacgctctttgcgcatgtctgcgtgacgaatacccttccacattcctcctatctgctaagcaccgtgatgcctcacttagcggatgacactcgctaagcacattgagctcgtttagcgagacatcaactctattatcttttcacacaaactcctttttgctcgaaaccgaagagaaattgacattaattgcatacacccggcttctactgagcacagattataacatagcacaatttatttacaatcctacaaaaagaaccataaac

SEQ ID NO: 35188 - DNA, 405 bp, Glycine max
  unsure at all n locations
tgtangattatggngtatccatcacatgtggtactatgtggcggtcgggcgatggtgcaagtcaactctccacatccacagatcacacataaacccaccatccccagttgcccaccttcactgagctcacatactcctacgtagcccttatactcgttcctctcaacactgggtccccatcaatctctccaagcttccacaacatccaagcaattcaacatcccaaacatcatgaactatcaaaaccaaggaaaacagggcagaggcagaaaactctgcccaacacaaaccaatatcacaacttttctcacttaaaaaccccagtaacattctcctcgttccaattcgttaaccgttggatcgactcgaaaattntactggacgtctctagcacataagtctaca

SEQ ID NO: 35189 - DNA, 330 bp, Glycine max
agcttatcaaccaatagctcatactttatgcttacaaacatatgtttatatgctgaagatcttatacaaaaaacatcacacatgaacgacaaacatccacatataaataatctatgggccaaagcgacaaaactcatcagacttttattttaagcctctcttactgaacagccggtattactactgcatatctcctaaatcaccgttgccatatgcagccatcattgcttgtgaatatatcatgctattgctcacgtataacttatagaaagtttctgtgcatgccacaatcatatttaagtgcacatatatgagtcaaatacctaacat

SEQ ID NO: 35190 - DNA, 427 bp, Glycine max
  unsure at all n locations
tgccttcttttatnntttttatcgcgaggaatcttatatgttaccaagggatctacaacactcacacaccttgtttagccaactgagctaaacccctttgatgccttcttttatatatatatatataacttcttttatctatttctagtatgtataccccttttctgaattgatggaatatctgaatatagagcttttgcaacagtcatttattgtacaatatcacaactcactagggtattttttttccatttcttctgatatcatgtagtaattctcttcgggcttctcttcaaaatttggaaagagtttcatctagttcaacagggatgaatacacatggacatccaaaacgtaatgatgattgtgattgcactctctgcctgaagttactgtatgaacctgtcacaaccccttgtggacattc

SEQ ID NO: 35191 - DNA, 444 bp, Glycine max
  unsure at all n locations
tgctggcctaattaactcgaaattgaaagactatgattattatttacataatgaanatactaagtatttattacctatacttaacataaaatacttatatcactacaaaataaccataaattgggagagtttgatataatttatacaagttttatacacaaaagttagtcgtgttcaccgactaacacaacacacattttctttgattgcttttttttttttacacaacttatttgttatgtgtgtgctgatgctttacctttttctttacaccccattcaactccactcccccaaatttggggtaagtttgccttgaaccatatgctctcctagaatctaaacaaggtatttggagataattatttaagttcggcgttcaattntgacaatgtaattcagctcanaaagggtgcaaaggatacaattattattcaaggtaagc

SEQ ID NO: 35192 - DNA, 438 bp, Glycine max
  unsure at all n locations
ngcatgcatctgcatccctaanaatcatgttaactacatagattttctacatctaatggccaatctttggaatttgggacgatcggccctctcaatgagtcaatctctttctttctcataaggatggacccttgggtactagtaccctcgtcttcagagggctgctcgccctcgtcttcaaaggactacacgtcctcgccatcaaagggctgcatgcccacgccatcagaggactacccatcctcaccatcagagggctacacgccctcaccttcatagggttacacgccctcaccttccgaggactacatgtcctcaccttcagagggctacacgacctcgcctttagaggacaacacgtnctcgccttctgcttcgtagggctacacgcccatacctttagaggactacacgtcttcgccttcagaggactacacg

SEQ ID NO: 35193 - DNA, 452 bp, Glycine max
  unsure at all n locations
agcttattgtattattgtttaccttatatttgtttgacccatctcaggctacatctccattttcaccatggtcatacactgtttatatgaaatgacaacatgagagtaaggaataatccttatattggaacaacagaatactgcaacagattctgaaatctgttatccataacagtgcaacaattttctgaattgtaatcagttgctaagttattatctttctagtgctttatccttctagtgctttatctctaattttctttatctgtaatttgaattcttgatttgctttatctgtaatttgaattctcagctctatatatgtaacttatatcaacatcaatgaaactgagctctttattctattcattctctctattctctatacctcacacgatagccactggattaaagagcanaaactgcgtagttaaagtgtacatgctattcta

SEQ ID NO: 35194 - DNA, 458 bp, Glycine max
  unsure at all n locations
tgcttgtggagcttctatggaggatggatctttgagcttctatgatgtcctctaatggngattntccaccatggaatgcagcggaagacaaaggagaagaggtgagaggaggcgcaatccattaaggaataagccatggaagaaggagcttcaccaccaagatgagccttggataagaagcttggagatgatgcttcaatggaggaaaagaaagagagaaggggggagcacgaaattgaaggaataaaagagggagagaagtggaactttgaagtgtgtctcataagactttcattcatcaaagttacaacaagtgttacacatgcttctatttatagactaggtagcttccttgagaagctntcttgagaaaacttccttgagaagcttctttgagaaaactctcttgagaagctagagcttagctacacacacncctctcataactaagctcacct

SEQ ID NO: 35195 - DNA, 591 bp, Glycine max
  unsure at all n locations
cacctacatcactccactangtatcgggcgtanactcgaccgacatgcggttgtcgacgactcacatcaccagcaccaaacaaacacaattgaagcgtttgananctgaaaccntcctagcaccctggangcatgcaagctaccaaccagcctcttcctgcgctacttcttggcgcactattcccactgcactgacgaaatatcacggcgaagtgtacgcagccacatcattgctaccatcgccacacagacacagaacaatcctccccgagtccacaacggagaaccaccgaacccggtcatcactcaccaccacatacgcatcccatactgaagtccacgccacatcactcacctgaatgcacgcaaccgcaaacgcccgccacacaacatcacaacgatgagactaagacaaggaagacgacaatacgatgacgaacgcgactccccttggacgcgacaaaacacaacgcaattcatcaatgagaacgctcaccgaaagaccaccacatcgacctacacaaactgcccactaccctgacgaattcaatctactgcgccgataaccataactcacaccgtactcaaccg

SEQ ID NO: 35196 - DNA, 442 bp, Glycine max
  unsure at all n locations
agctntagaccaactgggtgttgaccgcaaaatgttagtattatctctatttatttgcttggcaaaatcacaatgaacatgttagattgctaccttttacttttgtgtatctctgttgaggatggcatctaacttgattcaaattattatttgttatgttctacaggttanggagatatgcggttgagtcatacttggaacaaattttatcacatggtttcttccatgctgaccctgtgagtttgtacttttagaatcaatatcagaaatctctctatatattatgttacattatatatggattagctatctggtaaattgtatagtaaagccaaaatgttaactgtctttgaacttgctcttatgttgcaacgctagcatctattgtctgagcaatgagatgtacgctacttgtgttttacaattattattcttttgctag

SEQ ID NO: 35197 - DNA, 447 bp, Glycine max
tcggaagaaagtgatgaggtacaagccctaaaggcagagcttgtttgagcccgagtagtcgaagagaagttcaaatccatagccatcaaagtctgaaaagagtatgatgaactaagggacgtcaatatggccaccgctgaagccttggaacgagaaaccaagaaggcccgaaaggaagaacacgtgccagcaaagttttgaagggctttatagggcagcaatagtaagctcaagctccgaagaggtgaaaggaatcatcatgggtcaaaggcatgatcttgaaggacgagctaaaggcttaccttaggtcgaaaagaaatttgtcccaacagttaagcgagactgaagggaatatgtgggccgtcatcgatgagtgcaaagagaagctaaatctagcggcgactcacgagcaaaggctagaggatgagtacgccaagatatcagcag

SEQ ID NO: 35198 - DNA, 443 bp, Glycine max
agctcgaaacatatagattgaatcctagctcctcttaaggacttagttattatatctgtcaactggtcattagaattgatgaacccagcgataatctccttggacaataatttctctcgaatgaaatgataatcaatctctatgtgtttagtcttttcatgaaagactggatatgacgcaatgtgaagagctgcctgattatcacagtataacttcatttgcaccacttcacaaaattccaactcttggagaaattgtttaatccacataagttcacatgtaaccatagccatagatcgatattcagcctctgcactagatcgagcaacaacagtttgtttcttgctcttccaagcgataacattccctccaataacaacacaatatcctgaggtaaatttgctgtctatgggacaaccagcccaatctgcatcacaatatct

SEQ ID NO: 35199 - DNA, 565 bp, Glycine max
  unsure at all n locations
ccaccctctatccagcacaccccgcgcacgagacgatggagcgcacccaancccaccagaannaacgcggaanaacctgtagaccgtcgtcgtacgncacaccatagaaactcaagctcgcacactcgagaagcacgacaacattgtatatagacgagatcatcttctctacatcccgcctagagccgagacgcacccatagaccggagccaacaaccaaattgccacagaaaaccaatacaaaccctccagccaccggagatgacatcacaaagaagacaacagcgaagcatcccccctctaagtatgcaccgctgagagatcacacgcagaccaagctaaagacacacacaaaacatgcactcgcttaaccagcgccaaaaacgaggggcaaaccccgtcagccatcgccgcatacgcttcgaacacccacgcctgcatacgaccactgacgccgncccaaccaaaacgagccacctcgaacgagacatgcggatgacccgacacctgaatcataaacggcagaaccctgagtccatccccactacgcgcgaacgagccgaag

SEQ ID NO: 35200 - DNA, 377 bp, Glycine max
  unsure at all n locations
agctntcaaaagcatacaagctctgtggaatcttcctgtaaatctagctgtcaagggggggggggggggtgaccatatgaaacgacaactcgatagtaacgactattccttgtattgagacaacataatactgtaccggattatgaactatggtatacataagagcgccgactatctctgaaacgtaatcagttgatagattattatctttatacagctttatccttatagtgcttgatgatgaattacctttatctgtaatccgaattctcgacacgccccatctgtaagttgaattctcacctcgatatatgtaacttatatcaacatcactgagactgagctcattattctatacattctctgtatactctata

SEQ ID NO: 35201 - DNA, 389 bp, Glycine max
  unsure at all n locations
ttgatgtttgtgttgaatgcattaaaggtanacagaccttatgcacganataagtgcatatagggctacagacgtcttagaattgatacatacgaatatatgtgggtcatttcatacaccttcgtggagtggttgacaatattttatatcattcatagacgattaatccagatatgcatactttgttcttatacatgaaaagccacaatctttggatgtgttaaaacatttaaagtttaagttgaaaatcaactcaacaaaagaataaagtgtgtcagatctgaccgtggtggtaaatactatggcagatatgacagttcaggtgaacaatgtctggngccttttgccaggtatctagaggaatgtggaatcatcccacaatacaccat

SEQ ID NO: 35202 - DNA, 401 bp, Glycine max
  unsure at all n locations
agcttgagcatcctataccgtgttgaagatatctcatatgtcttcaggactgaactgattcatgtgctaacgaggtttcatggccttgctcgacaagacctgcacactcattgcatagaatgtcacatcgtctgctccaacataatgacctcagatgtcacatagatgatcacacactcactgaccgctttttctccttcattacatggagtggcacatgactgactgaattaccttgctccaaggtccatcgccagctgggatgaccttaatagactattctcataacaaattatgtctgctttcagcaccacatacattangaatgatatctccagtcttacataactcctcggatacagccctgttgactactgctagagattacacaactatgtgcc

SEQ ID NO: 35203 - DNA, 419 bp, Glycine max
  unsure at all n locations
agacggtcaacaatgaangagccgncgattgtatctactttctatcctgtatatgacagtcacacgacttatgagcgttcgacaccattacagcttcaaggccgataaagccatggtcattacctcccgtagcgacgcgtgcagctcatggactactagcatgctgatttactagaagagataccgcaccggtcgtggacatcactggttacccccatcggctggtcaatgcacatgtagccttgattctatgtcacgcttggccacatacgacgccgacatgaccactgtcctgcgaactggtcagtgacccctattatgctgagctatagccactcatggattccgtactgctggagacgccagtatgcactatggcagagaggaaccgttgatggtcgagagaggcatcccagtct

SEQ ID NO: 35204 - DNA, 219 bp, Glycine max
agcttgttcgcacatcgtccgcatctatgatattcactctacaagggctgaagtacatgagaccttaaatcctataacgcaatgcggccactaatagcgggcagttaacttgactgcgcattactgtcaatgccgaaagtattctgcactttactatccatgttcacacattattgcaacttgtgcttatgccagcatgaactacttccaatatataca

SEQ ID NO: 35205 - DNA, 409 bp, Glycine max
  unsure at all n locations
agctctctagctttncganggtgtatattcgactgtctttttgtgctataaagcgagggaatgtgctcagatatgtggggcaattttggcttgctttgctgcttgattgggttggattgagggtctgtatgggatggccctaggcctataatgcattctgaaacaatgggacatgccacattgtacccgttctcttgctattgatacctaaacgcgcgcccaccaagtgttcggtgaaatgcctcaatggcattagcgcgtgactcttgtaaggaaacaacccatggggcattttggattgcacatattatctattttttcggacatgcattcattcccgacagacgctagagtatttgcccacatatatcctatgtctaggaactaaaattctatgcacaatgaacac

SEQ ID NO: 35206 - DNA, 440 bp, Glycine max
  unsure at all n locations
ntgagggtgcgcagccgaccatcgatacataggagagttcctatattgcggctaccatcacgattatcgtcttctatttgacacgatctgcactgcagactatccggaaccaaatgacaagaggacggacaccgccgaacgaacgcaaccatcatgacgttccaagttaggactcaggaaggctccaagttagggcaccgcgtaacagctaccccagtgagactgccttgggagaaatgtattagcagatactcatcaatgacgatgcccttatcgttcgacgatacataccaggatggttcatgcggcaggtaacccccttgtactagtcagagtacagcaccatgaactcgcgaggggtgacgataccgggaaccacgaacaccactcctaggaagcaaaggcacaactgtacacgctcaaggacgtgaccgatctcg

SEQ ID NO: 35207 - DNA, 391 bp, Glycine max
agctcgttcgcacatcgttcgtgtgtatgactattcactccacaaggtttgaagttgaggagaccttcaatcctattacacaacgtggccgacaaaagtgggcagttaactcgaatggtcattattgtcaatgcagaaggtattctgcgcttcactatccatgttcacatattattgcagcttgtggttacgtgagcctgaactactaccaatatatagatgttgtttatacaaatgagcacatcgtaaaagcttactccgcacaatggtggcctcttgcgaatgaagcgactattcctccttctaatgacgcatggacacttatccatgacccaacagcaattcgtgcgaaaggtctagctatatcaacaaggataatgaatgagatgga

SEQ ID NO: 35208 - DNA, 446 bp, Glycine max
  unsure at all n locations
tcttggcactgtcattntcgtggcatctgaggggaccattattacatacattctttgtcccaccgaatataactcgctaagattttctggggaaacaaacgatctgcataattttctgagatgaagaaagttaaaaggaagagaatctgcagttggaagatctctcagctcacgaatctctaatgttgatggcttgcttttcatactcaaattaaagtgcgtgtgtgtttgtgatcaattaattaatgttgagttttaatcaatggagtatcagtttatatatatttacgacagcagcactaaactttaattaagaaaatatataccactgacatgaattattcaatcaatcagcatgacgacatatcaatgctatccgcattaatataggaataaaagtacaagtttatattattaataattaataatgttcaatgaaacatgga

SEQ ID NO: 35209 - DNA, 431 bp, Glycine max
agcttttttgaaggtgccttattgtgtgttgttttaccttcctgagacaatttttacgttaaccctccccaaaattaggggcatatcatgactaacatccttatgctctattaaaccctaatacaaggtaggagataattaaagtaggcttaagggttctacaaaaaacatgattatcatttttggcttaaataacgtgcaagggataaattatcaccaaaggttggctttttggctaagtggcttaaaataagaagaaacattgccttgatcattaccacctcatgtaattaatctaacagtctaagaatgatggaaaatcgggaaattaaaaatagacgttctctcacaagtaagtgtcgcacaactcaccgggacaaaacaaagttgttagcttatcgcaccatgatttctctcagatggactaacct

SEQ ID NO: 35210 - DNA, 422 bp, Glycine max
  unsure at all n locations
agcttcttatccatggcactctcttggtggcttaactccttcttccatggcttattccctagtggatgacgtctcttctcacctcttctcctttgtcttccgctacatctccatgatggaaaatcacgattgaaggacctcattgaagcccaaagatccagcctccatagaagctccacaatcaagcttccaccacgtaaatgactgaagacattgaagtctttgaaatgtaaatgaagacattatagtcttttgaaagcgtaaatgaatgaagacattgaagtctttgaaatgtaaattaagacattgtagtcttttgaaagcgtaaatgactaaagacattgaagtctgtgaaatgtaaatgaagacattgtagtcttttgaaagcgtanatgactgaacgcattgaagtcttttgaaat

SEQ ID NO: 35211 - DNA, 441 bp, Glycine max
  unsure at all n locations
ntataagtgcgggtctgggagacgaaggtcaagtgttcgcgatatgtgaagatgatgttccaagtacttcggatttggtccgaccatgccctcctgatttccagctgggaaattggcgagtggaggaacgccccggcatttacgcaacgagcataatgtaaacctttacggttttaaaagctctatagttgggcctaggctttagagttttcattntgttaaggctttgtgtcttttgtttttgaatttataatacaaggatctttcttcatctgttcctggtctctacccattctcattcatttgcatgtttacttctttntctgaaacggcagattcgatgacgagtcccccgaaggtactaatacctgngacccgtctatcaacttcgagcaagaaatgaaccanacggaagatgaaggagatgaggatgtgggattt

SEQ ID NO: 35212 - DNA, 448 bp, Glycine max
agcttatgtatgaaagatgttgtataagtttgtattgaattttttggcagcccctcaacagaaaactacatagaagatatgaaggcagaacacttagagaaactagcaaagctggaagagtggtgtaagcaaattcttattattactttctcgataaggatatgcattttgccaatatttttaagtacatatttttttatactgaagaacaaattaaaattgtaaattactgatttctttatattcgtaaatgtggttcaaagaccatatcagcattaagaacaaacatgggctttagcttcatttgacaatttacacttgaaaaatatttatcaacccaatatccaaattagaggaatgactaacatttcacagtggcaatgtactcaaaatattgaatgttattactgtaatactttagaatgaaatgagagatttatttattgga

SEQ ID NO: 35213 - DNA, 451 bp, Glycine max
  unsure at all n locations
ntgacattctaacttgttttgaaggttgggttannactaaatgttttttttatggataaatgcttacgagtctacttacatgatctaattgatttgaaggcttaataataatgagatcatgattttttatttttctaaatattcattatagacttaatttatggtgtcatctttaacttaccatcacttatgactatcacccaaaaaattataaccaagattatattacatattacttttcatcaaatcatgtttgacttgaataagcctcacttgttaaaaaaatctaaaatcaaagaccatcaagtatttatcatatatttcacttgttaggcttgacttaatcattcttagcttatatagttatgtatgtcaaactacttgttaggggttggactntcaaataggacaaatcattaaagtaagctttaacttccacttgtcaagagtg

SEQ ID NO: 35214 - DNA, 447 bp, Glycine max
  unsure at all n locations
agcttgtaaatgttntanaatagttaaacaattcttganaactattatctactctaacactcttcttaacactctgctaaaattcatataacttctatgtggatctcatcatccgtttgattagtcacatactaaattgtaacacctacatgaatttcaacgattaagaaaaatacatttaaaaaaatagaaaatatattaataacagtcttcacagttctaccagtgcaaacacccatttgatacttgtctttatctaattcttcttattacgtattcctctctcttggatagcaatgtatgtttttccccagcataaatactcgtgttgtagaataagggaggagagggaatgtaatctccaatcccaaattgttgatatcccttgaaattcttggctactaccactntgcttattatagctaatcacgaacaaacttattgtag

SEQ ID NO: 35215 - DNA, 434 bp, Glycine max
  unsure at all n locations
ntgctggcgttgagaagatatcacatgtttgtcatcatcaataagttggagaatgtgaatgtatgtatacatgnatttgatgatggcaaaagaagaatcacacaatgctcatatggcttcaagattaagacaagggatgattcaacaaacaaagacttgcatcaagatttcttcatgatcaagccttgccacacaatgaaagggttcaagtcattcaaggcacatgcaatctattaccaatggctcgaaagtgtgtcatcgattacacatcatatgtaatcgattaccagagactttgaacgttgggaactcagatgttacatgacgggtcacaactcgtccagaaacactattgtgtaatcgattacactatatctgtaatcgaatatcagagaggattttcaaggcatatcgccaacagtcacatcttatca

SEQ ID NO: 35216 - DNA, 419 bp, Glycine max
cagctgtcagaagcgagtagaagatcattctttcagagggttatgacttatcacagctctacacatgaagaggatcgaggacacaccatacctcaaactaaagtgcttataagctcatactaatcaatgtacacatacctccagcagaaggcacactatctgagcttcagatgctgactattatggactacacttattgagctcatcatagtactgctccagagaagaggacaactttggcccgacttgtggaatgtgcatatggtcattcccagttcctttgagaagacatagaatcattagctgcgagcaacatcagcttgtaagcttctgtcttatagtctgagcacagaatatgaacccacacataagactgtgaatacggaactgaacataggaaaccttgatgtgtgtctgta

SEQ ID NO: 35217 - DNA, 405 bp, Glycine max
tatacaaactgactcattacctttgttatgcaaacgctattatgttaatctagttcagaaggatcaatctcatactccgggacttcacgagcattgtgcacatgcatgggagccatctaccaaaaaaaaaaaggacgttcacagttgaaacagatatcatataccgactattctaaaaggagtttaacaattatgcaatgtcagatgaattggattatacgtaaaaatcaagccttgttttttactctctaacagtaattacgatatgattatagtctttctagtgaataatacataaagataataatagaagaaactgttttgaataatagttacaaactgcttcatatatgtagagacaaccaactgatatgataattggtaactaaacatatatcataaact

SEQ ID NO: 35218 - DNA, 211 bp, Glycine max
gacgattgtgagggccgtactactttaaaggatcaccttccaagtgcaaagaaatggcgtgattcacccttaagacagaactacgcaggtctgattgtctcatcccaatcgaggactacgtacgagcaaagggacacacctttgttcaggcctatcgagagttcaatatataaatggattaaatgatttacggacattccagggaacgtcg

SEQ ID NO: 35219 - DNA, 387 bp, Glycine max
  unsure at all n locations
agcttgtccatgtcaagagccaacaccaagttgtatgatgttnttacaaaaatacttccaggcccaatttttggtaaattcattgccaagttgggaatgattaacatctattcgccaacttgagggggtatcacgattaagcagttggagttagttacaagaagttatttgagtagttagttggttatggcagttagttggttactagaagttatttgagtagttagttggttatgacagttagttagttactagaagttatttgagtaagctagttggttactcaagttagttattttctgtctttgtataaataaaccaactctgtaatactttgatgaatgaatcctaaaaatggttttcatctatctttcatctctgataaaa

SEQ ID NO: 35220 - DNA, 391 bp, Glycine max
gattcaaagaatatgtggaaaagttgtttgtaaaggctgtcacacattgtcataatatatctcaaaatgcacgtcaaggtcttgcttttatagactctccaagtctggtcaagaaaaccattagaagagctataacctttagaaaaacctgaaaaccattggaagagttacatctttagatttttgttcagaacttgtcactggtaaacgattacaccatgcatttttgtgaaaggatgtgactcttcacaattgaatctgaatttcaacgttcaaacacattggtaatcgattaccaatatctcgtaatcgactacaccatttcgaaatcaattgaaccgttgtacattcagttgaaagctcttgcaaaaaaatcttctcactggtaatc

SEQ ID NO: 35221 - DNA, 315 bp, Glycine max
  unsure at all n locations
gatgagcctatctggtgagattatacttaagatatataagttgaagttccatcaagcctatattcaccatttttttaataatttatattttgcattcttctatatttgtataaatttagagcatgaaagcatttcacaaaatacagactacagaactcattttgaccaatataggatgatatagttggtcctaagcctagtagctggacttcaaatgaatatggtctctataaaatatggagtcggccaccccaatacattgtcacacttggctacatggatcangctacgccgagtcgactcacctatttacct

SEQ ID NO: 35222 - DNA, 325 bp, Glycine max
tagcttacaaatatgttataaattcttgcccatttttgaaatcagatcacagctagatcacatcagatgtgatatgatctagatgacatagtatctatatgagatgccatctaaatgatatctacataagagaagatctaacttgatagaacaaagctagctgccctcttcaagtccaagctcgagtctggattcaagccctcgcccgattctggatatagacccaatgctttattgagtcctgaaattagagtaatatcatcaaagtagctgcgtggacccgaataatattactgcctaataaatttgacaattaggactaatc

SEQ ID NO: 35223 - DNA, 214 bp, Glycine max
ctttctccctctccctctcgcgttgctattccctatttcttcttctttattgaagctccatcaaagctgcaacctttgctcaccatttctgctccacatcgcagaaggaagccacttttggaatcgtgaaatgcacctctacgttgtgggacttcaaattacaagtctgggtagacttcttctcacataaaatttagtgggtatacgggtgttt

SEQ ID NO: 35224 - DNA, 435 bp, Glycine max
  unsure at all n locations
agcttgtcatcaagttcttgatacaagaaccttatggatggnggtatatattaacttgcatgggctgtatgactgcaacatgattacactgaatttgttgtagtatgaccacaacaagttatggaacanaactcanatataatttcttagaagccattatatcatgctctaattaaaattgaagttaagcttctataatgtgtattaaaggtattattagagaattatatgaattaactatgtgaaactttaatcttgattgaagaacgacaatcaaaatttgcatataaattttatcctttntgatagattggttatggtgttattctttaaataatgagatttacgctttgattgctaagttttgctgtggaattcttggagaagtgtgctacaacatcttgaatttctaggagcttcacttaatcatggact

SEQ ID NO: 35225 - DNA, 430 bp, Glycine max
  unsure at all n locations
cgccgcccagctcgcccaggcgagcaaggttgcttcctacatatgcatcagccttctggaggaatcttctggagggcccaagtgggcctagttgctatttgcacccccctttctatttttttgtaattctttttccgtaacgttacgaaactttacgaatttcgtaacgatacttattttccttccgtaaggttacgaatccttacggattatgtatttactcttttttacctttcgaagaagttacgaaaactcacgcattgcacaaaaacacctcttttcaacttccgccacaatacggaatttcatggatcgcgcaagcctgcttcctttngatttctgagacgtctcgggacttcatttattgtgcaacataggacgccaagtatctcaaagcggctaaccaaaggtggcatgttatcaagtaata

SEQ ID NO: 35226 - DNA, 349 bp, Glycine max
agcttctacttatgtggcagggcgggcttccttcactattttgattccagtgcgagctctgaccactgttcttccttcatgcgacgctacttcacatgtacgcctgagtgggattatagactacaccataatacccaccattttctaggggttatatcaagctacgcatgccgccaatgaccttgcctaagaccgtcctagttttataaccgttccccaacatgactcataccaccattacacgcgcttcatacagacattgtagcccaactagggagaccacggaggaaatgctgaccacctgacacgactgtaaagcggctgctaacgattcttctgcggataccac

SEQ ID NO: 35227 - DNA, 447 bp, Glycine max
ctgatgatatggtcttcaccgacgaaaggatcatagtgggtctattaagaggcaaatctgatcatcatgctttgataaatgccaaaaaaaactagggcaaatgaagaacaccacctttagcacatacctatatcaaccacaaagtctgtctaccgcacttccaatgacgaacaccacctttagcacataccaacaacaccaaccaagatatgaattttgcagtgagaaagcctgtacaattcaccccaattccagtgtcctatgctgacttgctcctatatctacttgataattcaatggtagccataaccctagccaaggatcattaacctacatttctccgagaatacgactcgaacgcaacgtgtgcttgtcacggagaagccctgaggaattccattgagcattgtatggctctgaagcataaggtgcaaggtctaattgatg

SEQ ID NO: 35228 - DNA, 449 bp, Glycine max
  unsure at all n locations
ggttgctttcttctttcctctaatgtttctgttagcctgtttgtgttgatgtcgttcagcacactgctctttctgctccttattgcttagttaggaattttagctttgcagataaagctcagaaagttttatagttgtaaaagggtaatttttttctgatcttattcctcttcccctacatttaatttcattactttttccacttactatgttgttgtcaccataaataatttattgattatatatatatatatatatatatatatatatatatatatatatatatatatatatcaatatgagtactaacaacacatataattgaatatgattagatatatatcgataaaacatatctgataatttctcacacaactttcagttgtgcttatggtcctatgcagataatnggtcttgtgagtagacaatagttgacagtggagccagct

SEQ ID NO: 35229 - DNA, 340 bp, Glycine max
agctcttagttcctctcattacgttcttgaaatatgggcacggagcaaacacgctacgtgttgtttccttgatattaccatgcatatctttgcaatgtcatgtttatgtgcgtttatgctgagttattatttgatggcgttaccatgcttgctcgtctagtatattcctgttttgcgctatcaaccgcatgctctcgcgcatatatctatattgcgccatcactcatgtgttgcattagtctagtaattttgtcacgggaagtcgtaagggccgaatcacctttctaaatgcatacatggcgaactgtggtgatgactgctaatgaaccatgacgcccga

SEQ ID NO: 35230 - DNA, 445 bp, Glycine max
  unsure at all n locations
tctagccaaatggacttaccttgaattaattcctttgatagtctctttgagccttgtttccctttccttgttttgaagctcactacaagccttaaatgaaaaaccatgatatcaccatatccttaaggaattttggagctttggaattgttttgggaataagtgtggggggttttgtttcatacgataacttgttttgttggctatgcttcatgatgtattttgggccatacctgatgtacattgtatattggttaaatgttggacatgctgaatgaaatgttgtttctcaaaggctatagagtaaaaaaaaattgaaaaagaagaagaagagcaataaagtttagggaataagatcttaaatgacaaaagaatgatgaaactcttggttctactctntatgtttaaantatatctttacttcttttttttttcttaatatgaac

SEQ ID NO: 35231 - DNA, 412 bp, Glycine max
  unsure at all n locations
agctntcatatgatggtggtagagaggctaacttaatcatggtagcatcttcatcctctatcttaacatctatatctcttaattccatcaaaatagaattcaattcatcaagatgatctttaagagatgtaccttctttcatgtgtaaaccaaataaacgcctcttcaagaagagcttgttgcagattgacttagtcatatacaacttttccaacttgagccataagccacttgcagtttcttcatttgcaacttcatataaaacttcatcagacaaggaaagcaagattagtgagtgtgccttttcttcttgttctgcaagttcttcagtctttgaaatagaggccttttcttttgattcagaagccacttctttcttcacagatgcagaagcaacaatagcctaaacacc

SEQ ID NO: 35232 - DNA, 446 bp, Glycine max
  unsure at all n locations
ntaggaataagattaagagacatcactcttttgatagaattcaaattcacatgtgcaagcctagcatgccacatatcagaacattcaacatttgcacaaaagaagaaacactagatattttattaatagaaagagatataagacttaacttaaacatataatcacaaatgtagcctttaccaataaaaacaccatgtctagtaataacaactctattggactcaaaaacaaccttgtacccttgttggactaacaaagaagtacttattaaattttttctaatataaaaaatatgatagattccatctaaaacaagaaaattccctgaagatagctctagcttcacttgccttctcctaacacatgtgccatactctcattcctcattctcatagtacgtgtgcttgattcctgatataaagaannataattttttatcagcacac

SEQ ID NO: 35233 - DNA, 434 bp, Glycine max
  unsure at all n locations
agcttgtaggattatggngtacccatcacatgtggtactaggtggcggtcgggcgatggtgcacaacaagttgtccacatccacaatgcgcgcataaacccaccatcccctgttgcccacctccaactgagctcacgtactcccacgtagcccatatcctcgtttctctcaacaccgggtccccatcaatcctctcaagcttccacaacatccaagcagaacaacattcaaacagcacaagctatcacagccaagcaaaatagagcagaggcagaaaactctgctcaaacaccaaccaaaatcacagctttttctcgcttanagaccccagtaacaattccttcgatccaattcgttaaccgttggatcgactcgaatattctactagaagtctctagtacataagcctacattgtgaccgttgggatctacta

SEQ ID NO: 35234 - DNA, 438 bp, Glycine max
  unsure at all n locations
tccttttagtgcgtcacgtttaataccaagctcgatggtggttctatcctttgatggtactcggcgggaagtgatgggggaaatcgacattcccattcagataggcccccacacttgcaacatggtgtttcaagtaatggatataaatcccgcctatagctgcctcttgggaagaccgtggattcatgccctgggagtggtcccttcaacgcttcactagaaattgaagttcgtggtgggcggacttttattgatagtgtcnggtgaagaggacatgttagtgaactgcccctcctccgcaccatacatagaagcggcggaagaatcattggaaacggctttccaatccttcgaggtggtgagctacgcctctgtggaaccaagtccgtcgctaccttctctctccaaagcggcataatggtggcgccgtgtatgctc

SEQ ID NO: 35235 - DNA, 367 bp, Glycine max
agctgggactcatgagtggtaagtagaggtctatagggattgttcctgttgttgttactaatgcttttccttatggtacagatgagatcaaaagcgactccacaaacaagagcttcaaggtcaacgaacatcgacttaagtcattcttcacgaacccttctttagtggacgtagtggtggaagagacatccttactgcaccctactcttcctccaccatgacttaaggagtttttcttttcctatctccttctttgcttttattacacttggccgattctctttgatgatttaattgtttttaatctggtaattgtgctacattgacgacaatgtgttgtttaagtatggggggggagtgttctttg

SEQ ID NO: 35236 - DNA, 444 bp, Glycine max
  unsure at all n locations
tnctttggaccttgaacaggcaactaactcctctntcagatctatgctatgtgctcgcgactggtccctctcttcccttcgcagcttgagttcactattgctaccccacagagctccgcgaaatttattccagccatactcttccttgcgagccctcttggtctcttgttcaagggctcttgcggtagttgcattctcttcccgtaacccggcacactccttccgaatgtgtgtagtggccaacttgaacttctccttggcaagtttcgcctttcctaactcgcttttgagagcttggacttcttcgtcctgttccggtgcttcaaaactctcttcgctgacgacttttaacttggtgagccaatctaaacctcgtatatgaactttcaaccattcatggtacccaccaatgatgccattacgaatgcccctaagttcttgatc

SEQ ID NO: 35237 - DNA, 414 bp, Glycine max
agctggctacattgatgcatactgactatggcttgtgcgattttggcacttaaatacgggaggctcaagttgtctatcaaagaagatgatggtgagagtactaccctctattaaccaccctaatcaactttgtgaaggaagatgactcagcatgaaagtgataacgagttttccgcaggagtcagactagagctaagaagccgctcgagctaatacatgctgacgtctatgggcccatcaagccatgctcactacgtaaaataattatttcctccttttcattgatgactcttgaagacaaacatgggtctattccgtatagcacaagtcagaagtgttttctgcccttaagaagttcagagctacagtggagaaagaaaatcgcttatttatccacgccatgaggattgaccg

SEQ ID NO: 35238 - DNA, 545 bp, Glycine max
  unsure at all n locations
cccccactctacacgcaccgcggctccaatgatgaacggaccccacattcagaacaaagggaaaatgtgctcgtcgtcgcaacctaganactnaactgacggacgcgacggaaagaatatggagcaaaacgcctccgcttctattgtatagaccngtgcgccagacccgcgaggcacgtaaagaaacatgcaacattccgcacacacgaggaaacactggaacattaagtaagacaacgagatgctagacttacgagctactgtaagtgctagacgtccgcctaccaataataacacacacgcaaggcctaagcactctactgaagtggaaaacaacctagcacacatgaaggacgaacaaacaagcacggtacatagaggatgtaatatacaaaatatgagagatgacatccaagacgagaaaataccctgaagatggaggaaggacacttgccggatcaaacaccagaccctacgctcacccctctgaccacagaacgagcgcgagatacggaatgaagacaacaatctatggactcaggccg

SEQ ID NO: 35239 - DNA, 130 bp, Glycine max
ataacatattcatgatttgttggcatgctcaccactgttcgtttctttacgaaactccccataaccaaaaaagcgcaaacgcacccctataacacccgatccaaaagtaagatgggtaaggaagagggag

SEQ ID NO: 35240 - DNA, 416 bp, Glycine max
tggcttacatgagtctacacgtacgagggatcgaggtttatttctttagtcttcagcatagaacacacgaacattcttaattatagaaatatctttatatgcatcagctcgtttattagaaagacccaacgcttttaaaccactgtcgtcacttttaattggttgaggttattgtttttctaattaggatatatcatacttttacttcaattcacaattattattttctgtcaacaaaatgcctgattattgaacaaacgcttgccaaataaacaagttccctgtgttcgatactcagatcattccgttttaattttaaatacccggagcgcttgctagtatatcacttcccctttgatatgatgctgaatgaaacttgttcacatttaaggtttttacaagggtcataaagaaac

SEQ ID NO: 35241 - DNA, 400 bp, Glycine max
tctgcaggcgagctgcacgcgtgcaagcttagggataccagcagcatattatagactttcatgcttgacattattaaggctgtatacttgttcaaaggacacaagaattttagtctacaacatgtaacagattaacagttgccaaggataaattacctgtactatcaagacaatagctctctgatgatgcacacggcagtcaaatgatacgctccgcaccttgctagcaagtgatgcagctccacctgagttactatttaccattagaacgttgaaagtagaacagatcacatagaaccacgatggaagaaaaatagtataagtactttttctcgtacagacgaacatactcaattatgctaacgaaattctgaccatctgcatacacagctctgtattc

SEQ ID NO: 35242 - DNA, 449 bp, Glycine max
  unsure at all n locations
ntatccatagcttccctcttagtttcttgaagacagagttaatcaattntgaatttccccaccanattcctgatagaggcccatttaatgcctctacccaaccctctaatgttgtaggaaaggatattcatctatgaatattcctattccccagctccatagcttttttcctgtcccgagactccatattagcaaagctgtgaataccttcatcttgttctatatcagcctgtatgcctataatttttgcaaggtgccattgctgtttggcttcttccatgacttgngaattgctttcttctatactttntaattcgtcatatgcttcagagactctgtgttttgggcctctgtcttggaactcacttacatgttgctgatcaataccttcatttaacatgnttggctcttctgctacaggctcgangtacttcctctttggtttgata

SEQ ID NO: 35243 - DNA, 373 bp, Glycine max
agcttgagatgaggaagtgtataacggtgaacttcctgcttttattcgttgaccacagagtggtacctggagatatgtcgcggcggtcatgagaccttgtggacgtcaggaggggtgccattgcccaaaaccaagcttgaccaattccaacccaactcgggcatagtcagtcagtgagaacctgtgatgtacctaaacaggcgagctgctggcagtcaacagataataggaacaaagaccacagagcaaggaggcttgtggtggctggccaactatgaactcgatcgatatgtgggatatggcctctggtaatcgattaccaagggttggtaatcgattacaaggcttatgaatgaagacatgaggctaacat

SEQ ID NO: 35244 - DNA, 424 bp, Glycine max
  unsure at all n locations
cgtgggntaaagtctcacaatagtcacgtgttaatgtttctttgttagccgnggctatatgagacatcttgcgaaacaaagtcaggttagccatgactcgcctgtgctttttcttgcatgccatatgtagcaaagtcgttgatccctgcaagtatgatgagcagtgaaatgaggctgcaattatactgtgccagttggagatgtattttccccctgctttctttgacataatgattcacttgattgtgcagtggatgtacccggttgagcgatacatgaagatcttaacagggtatacagagaatcaatatcggctagaagcatctattgttgagaggtacatctgtataagaagccattgacttctgttagaatacattgagaacgctatacctgatgacctctctgagtctcgacatgatga

SEQ ID NO: 35245 - DNA, 437 bp, Glycine max
  unsure at all n locations
agcttgctatagtcatgcagtgctttgcaagttccttacccatgttgggaaattgaagtgtgtgatcgactacctcatantttgggaatttaagaaagtaatttttgaccatttttaacctctaaaaagttatcaaaaacattataatgattttttcaagcaaactgccacaaagattattttgaaataactaatattaattgtcacattattatttaatagagaaatataatgatagggatcaaaatcaaattaaaaaataaattaaagataaaaaacaatcccataaaaatttaaaaataaaaacataatttatccataaaataatatatattttccgtcttgattgcatgtatcttttaagttaaaataatcatataccaatcgataagtggttggtggtccataanatattactatatgcaatagctaatata

SEQ ID NO: 35246 - DNA, 433 bp, Glycine max
  unsure at all n locations
tattgttctttacaatatcatattattaacatgttaagcttgtattaaggttcttgtgtttctaattttcaggtacaacaactaataatggtgaacaatctttcacagttgttctatagtcaaattatttggcagtggaaggaggaatatatatttggtgttagttttgggagctactaggtgctgatgacaactactacaatgttcaaagatggatgagtgtttggtgtgaggcaatggcaaagcttttggtagggatgtgcaaaatttagttgttttatttatttaaaaattaaactgaacagaactgaattgtttaaaatagttggtttcttaattcanataagcaaattggtttagagaataagtcccanattgattntgaagaaccaattctaaattgattttgattanactagtttcgaattgattt

SEQ ID NO: 35247 - DNA, 508 bp, Glycine max
  unsure at all n locations
gtangaaacccctttgaaacttttgacacactggtagatcctctagagaccacccgcacgcacgcaagcttcgcgatcttgaacaggttctatccaattcaataatcatctgctcatcgaaaaccagatcaggtgcctgattagatctggaatatgtgtaattgctagcgtgtcagctggcgtaattaattgtgtgcaatggtgagcgattacatgcttgggtgattgagtaaccgacagtgactcgcctctaagtacatgattcaacatagattccctggtcgcacccattgattatgcaatagaaattctgttgactactagatatacactatgtaagaagacagagactgtctggaggatgcatctggaatatatgggatacgattcgccatgaacaaactgcgtaaagaacaaattgcctatgtcatcctacaccatactggagaccattggcttacaacaaatagacctataatcttaggcattatgtcagtgtctttctccn

SEQ ID NO: 35248 - DNA, 438 bp, Glycine max
tcgaaggggactcctgcacgtgccaccaaaccatattctcatcatgttattggattctattgagcatatccacatgattgattactgtctgatgccctatgcgtgtgtctccataagaatcggattttgcacctattatattatactgctgcatctgatccttcaatagcgccggtcattgaattccccatattagccctcttttgtacatgccattggggctttcgcgactctcaacaggacttttttcgtatgttcatttttagcgaaggagatacctaaccctaacgatatcccctttctgcccactccttgctgaatattctctacattcgtgccttctcgaacattcgactccagctgtctgtctcatgattccgtaaatcattagatcgtgactcaaagcattggatgacctctcattatctatataccatg

SEQ ID NO: 35249 - DNA, 441 bp, Glycine max
  unsure at all n locations
agcttggccctccactacctcctccacccactctangctattatggcccgaatccaaaccctgttcagaacctgacccagaagaagctctctcatttcacctccaccaaatctcgaagctacatcagaatcctctataggggccctctctgtcgccgcttgaattagcgccagtggcatgtcgatgcatggcctccccgccttgcacttttgcctcaatgcagtgggaaacgatggcgtcatcattgactcgggcacctgcgtgacccgacccacctacattgccctacaagacgccttttgtgttacggcctcgcatttgaagcgtgtgtcggagttctcactcttcaacatgtgaagacctatccaggctcacgaaggtgaaggtgcctacgccgatgcatttggctcgtggcctgacgagagcagctcttcatctaat

SEQ ID NO: 35250 - DNA, 296 bp, Glycine max
tcgacgatctggtccgtaacggacagaggatcatcactcttctattactatgttatactgagcattatgctctggctattgctacttacctgtatggctgacgaacaacaccacctttagcacatacctgagaaaaccacacatgatgcctaccgtgcttacaatgacgagcaccacctttagctctaaccaatatctcctaccaccaaatcatttttgcatggagtatgcctgttcaatacagcccatttccagtgacctatgctgacttgctcctatatctacttgaatattca

SEQ ID NO: 35251 - DNA, 430 bp, Glycine max
agcttgctgattacattctccctctttttttcaaattcttaattcttcttgacatcatcaaaatcttcatgatttacattctccccctttttgatgatgacaaccacctgtaggttaggagcaacaacaaagaaaaaatatctatttgcatatagtttactcccccttggttttgcaatgattgcttatatgagacagttgaagatttcatatttttcatatgtaaacaaattgtctcataaacaatagataatttttcttactattttatctccccctttgtcaacatcaaaaacaaatcatgaatagagaggataaagatgttaccacttgttgcaatgtatgagaatcaagtgataccaaaaggcattaaaacaatcattcaatattaatcaagcaaaaacaagtacaataacacatcaatcaaaca

SEQ ID NO: 35252 - DNA, 414 bp, Glycine max
  unsure at all n locations
tgacacattacctgctnttcacatctatacttttgtggaggataaagaagaagtaggtgtcctttatttcctanaatatgctcacactctctaaaagcttgttaagctnttttgcttacttttacttatgtcatttccttgtacaaatgctcaacgtgtagcatgcttttgatcaaaggttgtacttacactcaaaaaaacctttcttttcgttaaattattgaaattcaaatcttagagcatattcaaaaacaatataagaagagttaaccttaacattcaagctacataggaaatgggtctcacccattgaatcatccaaaaataaaacctataattgtgaaattcacaaatgctgccttatctattanggacaacgaaatgggtccgacccattgaatcacccagtttaac

SEQ ID NO: 35253 - DNA, 430 bp, Glycine max
  unsure at all n locations
agctntanaattcgaattaaaacgtttagaatctgctggtaatcgattaccatatatgtgtaatcgattacacagtgcaaattttgaattcaaattttaatagttgttgtaaattagttttggccactggtaatcgattacatcctctggtaattgattaccagagagtaaatctcttgaaaaagactttttagcttaaatttcttggccaaaccttttgctacttcaattggaattctcttcctacttaatataccctttctaagattctagagactgtcttgattatccatcttgaatatctttgatttctttgtcttgaataaagctttgtgaaacatgtaatcctttggcatcatcaaaacatcaggttgatcctttgtctacaaatcttgaacttattctcttgggctttttgtcatcatctttg

SEQ ID NO: 35254 - DNA, 438 bp, Glycine max
  unsure at all n locations
tgtccaattganataagctgaanagagcttattctaataatcttttccatcgagtttattgaaacaagttgttcaatagactgcaaaacctttttttttttgtctttattaggattgaataatgcaccaagtttattgttattgctgatgtgcatagatgttgacagggctgatatttggtcttttgggattacggcacttgagttggctcatggccatgcaccattttcaaaatatcctccaatgaaggtatttacatcccgtggttgttcagagacaatgtctagacacatgttaacattggaccgattgaagttcatgtgatataatttgtaataaaagaaaaagagagttcactttttatttcatgtataggttcttctaatgacaatgcagaatgcccctcctggacttgatgatcgagataaaaagttctct

SEQ ID NO: 35255 - DNA, 443 bp, Glycine max
  unsure at all n locations
agcttttcgcanagcttacggtaaaatctgtgtcctagccatggtagaagtctctacagaggccattgcctccctcatccagtattatgatcagccattgaggtgcttcacctttggggacttccaactatcacccatggtagaagaatttgaagagatcctaggatgtcctctagggggaaggagaccatacctcttctcagggttctatccctcattagctagaatttttaagagtccaaatcttggcgcaggaattagaccacagaaagcaagtaaaaaatggggtggttggaatatcgagaaagtatttggaggcaaaagtaagaatcttggcaggtaaaggcgaatgggccccgttcatagacattctcgcactgttgatcttcagaggagtcctctttcggaatgtggatcgggtggtggacttagcagcgatcgac

SEQ ID NO: 35256 - DNA, 376 bp, Glycine max
  unsure at all n locations
gaacaaaatcgccttaaatcatttcaaatatgcatgttaattatttcgcatcaacaagaatcaagccaaggctattgtgcaagcaatcaatggggcaaaacacaccatatgattataatgacggatggctcaaattctcacaaaggtaaaatcatcactttcacattgagctttcanaactatcatgacatgtagagaagaatcaatgatttcaagtcacaaaatgtcaagaacttttattttcaaaacaattacccatttcttgaacatatcctataattcaaagaataacatgcaaagtcgtacgcgcacacaaaattgacccaaaatattactctgataatccgacgaaactaacaacattaacaaattaaca

SEQ ID NO: 35257 - DNA, 446 bp, Glycine max
  unsure at all n locations
agcttattagtcggtctttnccatttatttgtttttatgcattgccattgttttttcattaactcttcttgtatctactttataatttaaagattgtgctaatcagtatctttaagacactgattaagaaattcagaatgaaaggttttaattaaaaattgacattaatgcatatatactatgatttccaacacactttcaacgtgaattttttttaaaaatattttaaattccttaattagtgtgcttaagattagaattgaaggggttttaaatgaaaaaataaacacccacttagtgtcaatcatattaatccttatatatcgataaaaaaaaatatattagctcctatataataaaacacttacatgatatatattcttggaaatgtatttctttagccatatcagtcttcattttaagaatcttgataattacgttgagtg

SEQ ID NO: 35258 - DNA, 366 bp, Glycine max
acgaacccggaatgggtgtagggaaagacaacggcggcatgactaacctgataaatgccaaaggaaatcgtgggaagtatggtctatgctataaacccactcacgcggatataaggagaagcatcaggggaagaaatagcggtgagcatagctctgtggatgaggcaagaaagtgaatgaagcccgccctgccacatatgtagatgctttatatgcgcgggtctggaatacgaaggtcgtgtggacgatacatactaagatgatgttccgagtacattgtatatgagacgaccatgccctcctgattccagctgagaaacagacgagtggaggaacgcctcggcatttacgcaacgagcataatgt

SEQ ID NO: 35259 - DNA, 362 bp, Glycine max
  unsure at all n locations
tccatcacgtggtggcttgcaaccagcttgagacagaataatctgatatgtattacaaacaaaaccatgagagacagggaaaggccacatgnaacctataccctattatgcttataatacgatcttaattatatcacaatgagactgatatgctagaggaggataaacagagacaaccaagatattcacaatattagcaaaccagggattgaggaaggacttggacatactctacataatgtacatatggccatgagggtaatcataccgagtggatgattacatacaggcatgcatacaccagctaaagtggaccgactgaggttatgtgaccactccgatcacagatatcaaatagactc

SEQ ID NO: 35260 - DNA, 442 bp, Glycine max
  unsure at all n locations
agcttcttgttnctggtaattagatgaaatatttcgtagcttgagtcgatatagatctctacgtttcagcggggtacggtactgtacggcttccccttctatccatgaagctgcctcagggatagtaagcctaaatttcccaaaaatatttatacagaacctcgattttctctttatgcagcatgcatttctatgggtatgatggcagatagctctcattttgcaggctttcgcatctattggagtgtctgataaaccttgatgcgttaatgcgtggcattagaaatatgaatggtggttgggtctgcgcctttgtatctagcatttacatcctggtattttcctttattttcctgagccaaatattgatccttgacttttgcgatgtgcaccgagttgagattacactcctaagacttgtgtactagcatctttccttcgc

SEQ ID NO: 35261 - DNA, 282 bp, Glycine max
actgtgtacatttaatctaatctttcccagactcagctacaattaaaccactgtacattaatcataatagtaacgcttgaggggagagtaatgttgcaatatggattctgctccattcctttctttactatcaaagcttcgcaccgatcatctcttttataatatatatcacaagcctttcgcgatatcagttatttatcttctttcaagatatcgctcgattaacaaaaccttatgacacgaacatatctgccaactaaacaaacgatactttctaaataa

SEQ ID NO: 35262 - DNA, 286 bp, Glycine max
ggtccaccgccttaacatgaccacctttgaagtagaatagaatcactcgacacaaaacaactacgtcggtctgatgtcctcatcgcacttgaggaacacgaacgaccatagggaaacacccttgtcgaccaccagcagagaaatactgtacaaagggcataaaggatatgacgacataaagtgggaacataacaaatcaaagccgtgtgatgcacattcgattaaaggatgccgtcccttgggacggacgtgcggtgtgctaataccttccccgtgcgcaaataca

SEQ ID NO: 35263 - DNA, 502 bp, Glycine max
  unsure at all n locations
cggacccccgttgatacgtcgagacctgggatctctaagacacctgaggcctgcgcgctgcaggtcttaggaaccatctgggttctggncattgtagacgtctccacagaggccatcgcctgcatcattcaactctacgatcagccgttgaggcgcttcatcttgggcgacttccaactatcacccatggtacatgactatgtcgagatcctatgacgtgcttcatggggattgatatcataccttgtctcacggatctatccctcattagctagaattttgaacagaccaaatcttggtgcacgatgtagaccacagatagcaagcatgaaatgctgcggtgggtatatcgataacgtactagcgggcataactttaaatcttgcccggcaaacgctgactggaccccgctcacttacatgatcgcactgtcgatcttcagaagagtcccttctacgaatgtgcccgtgttggtgaactcaccatcgagcaatccttatcg

SEQ ID NO: 35264 - DNA, 323 bp, Glycine max
agcttcgaagtcaacagactacttatgaaccttcacagtttcaccatttaccaacaatacattattaattgacaagactcaagcgtgtatttactgtgctttaaacggagcttcttctctactccatacaactattattcattaacgtataagacaagactgcatactaatcatccaagtctacatacatcataatcccaagttcaactagacaacctaatccatcacccttctaaaaagaatggcaattccacaatagcattattggattcaaccatccaatagtacatcacccattcactattccttgctgacaataccat

SEQ ID NO: 35265 - DNA, 440 bp, Glycine max
  unsure at all n locations
ntaagggcctttcagtgcctataaaatcaagcagaactactatcattgatctcagtattaattcagattgctcactgcctaattgggatcgacaagcttccttcaaatgaatctatgaatgctcatgttactcttgcttgcattaacacaattccttgtatcatgtgaaggcttcaaagcaagaactgcttataactatgtatgattatactttatgctattggatgttattttggttgggaattgagcattaatgtgacatacagtagttaattccttgatacattaggggaccgtttgtttatatntatttctattttgaaaacaacgttgggtctgcacatcggggtcccctaacatgcatcaagccctaactggatgattggttgtatgctctacagctttatcagactncgtttcaaactagttcttttttcatg

SEQ ID NO: 35266 - DNA, 279 bp, Glycine max
aattattttgatgtgaaacctcgttctactccttatgactcatccataatactaaagaagactttgcgttgctgaatttcttcacatatatattcgcaaagcatcggctctttgttgcatttgacaaacttctctacgcctgacattgcatatgcagttggtaaattacgaaggtgaactaataactctgatcattctcattggattgcattacaaagagtatttagatacttaaaaggaaccatcaattatggcattcattatacatgtgatcctgca

SEQ ID NO: 35267 - DNA, 439 bp, Glycine max
  unsure at all n locations
tcttttggactttgaacaggcaactaactcctctttcttaatcatgctatgtgctcgcgactggtccctttctttccttcgcaacttgagttcactattgctaccccatatatctccgcgaaatttgatccggccatactcttccttgcgagccctcttggtctctcgtacaagggctcttgcggtaattgcattctcttcccgtaacccggcacactccttccgaacgtgtgtaacagccaactcgaacttctccttggcgagttctgcctttcctaactcgcttttgagagcttggacttgctcgtcctcttacggggctgccaaattcccttcgctgacgactcttatcttggcgagccaatctaaacctcgtatgctaacttgtcaccattcatggtacccaccnatgatgccattacgaatgcctctatactct

SEQ ID NO: 35268 - DNA, 194 bp, Glycine max
ggtgctattgcgcatcaccaatctcgaccaaactccacccaacccgggcatagtccgacagtgagaacctgtgatgtacctatacaggccatctcctggcagtcaacttatgaaaggaactgagaccacaaagcaaggaagcttgtggtggctggccagctctgaaacttgattgatatgtgagatatgggctc

SEQ ID NO: 35269 - DNA, 410 bp, Glycine max
  unsure at all n locations
tatctgtgttcatccgatccncaagccactccttagatatatttaatccagttagtttccttatatagtatatatgaaattggcctttgtttccttttcatatattgtaaaagatacaccatatttaactgtgttagctcttcattctctttggccaattaatgtcttaaatcaatgtgtgacaaacaatatatagctaactataattaacggttacaaactatattggaagtaacttttttgtatcagcaaaatagatatattgatgcatggtggtacaagggtaccacaattccatgattaaatagcaactaaccaaaaccagaattacaatatgcagtaagagtcattaagtgccactgatatgatccgacaaaaagttccaattattttcaatatgtaatggataa

SEQ ID NO: 35270 - DNA, 432 bp, Glycine max
agcttagaaagacattatttcattcataacattatgtaaactagagagccatccacaatatgcgaataaaacatatatgaataattaaaggacatagaacacaataccgaatgtaagtacataccactagccatatatcattgaaggaattaagggtaagacacataatcataaacagccaagagcaggtctatataatcataatgttcaggcatactaagcaagtgttaaaagaaatactacgtgttcaaatgtcataaaaacatatgcaaatacaaggcttacgaacaaatataattataatctaaatatattatccgagaatcaaaacttaattctaagtaacaaaaattagatatgaacacatacatggtaacttattacttatctcgattaatgaaccactagaatgtaagtatcgaataacaatca

SEQ ID NO: 35271 - DNA, 431 bp, Glycine max
agcttataaagataaatgatgacatgattttttcccaatcacactatgttgaaaagctgttgaagaagtttaattattttgatgtgaaacctgtttctactccttatgactcatccatcaagctaaagaaaaatttgggtaaaggaatttcttcacataaatattctcaaattatcggttctttgttgcatttgacaaacttctctaggcctgacattgcatatgcagttggtagattaggaaggtgtactaataatcctgatcattctcattggattgcattagaaagagtttttagatacttaaaaggaaccatcaattatggcattcattatacatgttttcctgcagtaattgaggggtttagtgatgcaaattggatttctgattctgatgaaacaaaatcaacaagtggttatgtttttacttta

SEQ ID NO: 35272 - DNA, 437 bp, Glycine max
  unsure at all n locations
ntaatcaccatccatgtatgaattaaaaaaaatctattaaactcattaaataaccagcaaagtatagttctttgttggtgaaatgatccggaagcaaaacctcaaatctgattggtcagtatctactttaattgttgatgtaagcaagttcacagtgtgatgagcaacaaatttctcatcatgtactccaccatgatgatgagaagacagatcgacttaaaagtccagagctcagagctattcctctggccagaatgttgactactagacccctacacatgataaataaccacaaaaaatgtttttttatataaatgtttgccaattaatcaccctcaatgtatcacttgataaatgttttttataaatggcatgcacttccggaaaccaaaaaatgagtgtgtaaagacaaagctgattccaaacctggataatat

SEQ ID NO: 35273 - DNA, 447 bp, Glycine max
  unsure at all n locations
agcttaagctctntcaactgcacaagcctcttgttatttgaagagtatccttgtggaaccttcacccaacgaagacactgacaaaaacttatcttctccttcttggacaaagtatggcaggctgngggcaagtaaattttcttcccatcagaccttggatgcaactgtgatcgtatacccatatcagctagatcttgacgggtattcaagccatccttcgtcttgccttgaatgttaaggagcatcccaatcacactgtcacaaacatttttctccacatgcataacatcaatacaatgtctaacgtcaagatcacaccagtacgaaagatcaaagaaaatggacctcttcttccatatgcaactctgactnttatccttcttttgggtcttcccaaatacagtattcaggtgttgaacccattgatatacctgctcaccagtcaac

SEQ ID NO: 35274 - DNA, 399 bp, Glycine max
atgaccctgcaatatgtcttgcacccatgcatggcctggttgttggctgggtatgcacaactctttacataaatttttttattgcatattcacccataaacacagccacatatgatgcttgcttcataagttcatcattttcattggtattcgattcaaaattttcaaccaagtcattcatttttgacctgtatagaaacaatattacaaaatacaacatatatcaagatacacatgataaaacataagttcattaccaaccataatatggctcggtacaagccaaataagaaacataaccaaatttgataacaaaacataatatgagttcaatagaacatgactcataccaccataagcaaacatctaagcactagtacataatagtaagccaatgca

SEQ ID NO: 35275 - DNA, 449 bp, Glycine max
agctgttcaaatgggtaaaaggctcacattctctttcttctacatcatattcaaacttgtccaaataaataataaagtcatctagacacaaagaaggtcatctaagtttcatacaattaatatagaacctatatcctaatgccacatcctatcagagcgtggtgtccccgtgtcctctagcatgaggttcttcatagtcatccacctattcatctgctcccccgaacacaaagttcaagatcatcacaggattcaaacacaaacaacaaaccgagagtgagttatcacatttctaactactagagagaaacaacacaacatatagtagccaaatacaatttacttagcatatctcacattatttcatcactctgtcattcatcaatcacacttgtcatccatcaatcacacctttcaatcatcaatcacaatacacaggaatcacacac

SEQ ID NO: 35276 - DNA, 444 bp, Glycine max
  unsure at all n locations
ntggttaagtcatatgtctaataattgaagactttagcgttctctttgaatttaaaataaactatgataaaagtgactagcaaggtgaagatgacacatgcgttatagttntatttaaagcatatttctagacaacattgaacttcaactaactaagggttgaagttctagtggcttcattctacaacgtttcacttagcttttctagcgaacacacctttataggtagctctttccaagacaattgcaagctaacggtaattgaaattaagacaatattctaacaaaaataattcttaaaagntaaacactattctcgntcaaaaataacttttaaaaatactattatctagtaatagattgtaaacacattgttatttaagacgaggattcaatgttatgatataagagagatagagtttcctatatatacttttgactttt

SEQ ID NO: 35277 - DNA, 444 bp, Glycine max
agctcggtgcattgagaaggatctctgtcgagttggaaggacttcacttttttagtgggtctcactctcgactttgcttttatcaaatcgagttcagtttctcccaagttactattgagggaggcgcatgctaccgattgtactttgggctttgctacccttttccctttagcaatcttgaggcttacaatataacattccattccactcatttgatcaactctgatagtgataattttcccatcctcacttgggaacttcatcgctagatgcggagttgaaatgatggcccctaactcgttatgtgaaggacatcttatcaatatattggaaaaagtcaaggcgtcgactaaaaagtacttgatcatgatggcctctgacccctcttcatctttgaaagtagttagcaagtgcacatatcctattgtgctcattgtctctact

SEQ ID NO: 35278 - DNA, 444 bp, Glycine max
tatgacctgtacgatacacaagttccctaagctctgagttcttatgagtgaaagaggtttatgtatgtttgaccaaattatcacacaaaattagatgactcgtgatgttagtatctgtcgtaagttgtattgtttagagacattgtattttctaatgatatggagatattttaaatagttttgacacgtgccacaatgtacatgattgtcttgtctttgacatatgtcgcaaccctagataacattgcatacatcgagggtggctctttactacagaaatgtcttttgggggtgctgccttgattggtgccccctatggatgatgactattgaagcagctcttggagaatgaaagacaccattaatgatgaatttcttctacatacgtacttagatgtgaagagttgtattgatgagatgttactgttggctaggggaaatgaa

SEQ ID NO: 35279 - DNA, 397 bp, Glycine max
agcttaacaagtggaatcagaggaaagtctctatggcaggcttaattactttaattaattctgttctgacagccttgcctttattttatctgtctttcttcaaagctccttcagcagcgttagtgaggctgacttcaatccaaaggaattttttgtggggaggaggtgctgaagggaaaaagatcgcttggatggcttgcgatcatatatgtactcctagaaatcaaggaggtttgggtatcaaagctatcaaggatcttaatagagcccttcttattaaatggaagtggctgatgtttcaccaatcagaccaattgtggtgcagaatcctcatctcacaatacacacgatggagagggctggaagagaattcccacaggcagtctcattccttctg

SEQ ID NO: 35280 - DNA, 591 bp, Glycine max
  unsure at all n locations
cgcgcactctcaacnacaccacacacgccgtcaagtacgaactaatagactatgcgacacaacaataaactatacacaggaaaaaaaggagggntcctgtagacctcgctanaacgncacactatataatacacacgcttcagcagcacgattcagcacctacgagcagatgctttcacggtctttactacgagcacacgcgcatagagacgtgatcctaccttcgacccaaatgaaccacaactacactacctcacaaagcctccgacctgacgaacgaactaactcactaacacggaccatggatcaaagcagaacatgccacgcaccgcgtcctcagtacaataaaacaaggagaccacaaccatcggacgacaacacaaaaccaacaatcggacaatcaaaaacaccgggctaagaccctgacaacgcggaacgacaagcgccacaataagccttgcaataaaaaagacatacagcgccgcacacggaagaccaatacatgcagcaatgaaaaggcgaaaagaaccgaacgatgacgccactcccaaccttacccatctctataacggcgcacgtgcgactcacacc

SEQ ID NO: 35281 - DNA, 348 bp, Glycine max
agcttgctctaaatatttgtcatggttcacaatatgtacttatgaccgctgaactcctttgtagatgataaagcacgacacgaagggtccattgtaaaaggataccttatgcaaaaaatcttgacatattgtttaacatatctagatgaaaatgaaactacatggaatcgacctgctcatgtagatgatgaaccaattaatggtctacaacatggctaacaagtagttgacttatttcctctagttggaaaaccaattgacgactcttcatattacaccctcacacccaaagaaaagttacaagctcatagacatgtgttaacaaatcgtcctttactcgattcctat

SEQ ID NO: 35282 - DNA, 455 bp, Glycine max
  unsure at all n locations
tgtataactcttaaagataaagagtccaagttgtgtcttgatatttatactagtgttaaggaaagagctattcttctcaagaactttcaagagttggaaaatagacttaaagatcttcaaaaggatcagtaggagctgaatgaacttcatgactatcaaaaagaagaaagatatgatctatggtgagaatgcacacaagcacacaaagattatgaaaacctcaaaataagtaaaataatctttaggtggaatgtgaagaacacaagagatctgtgaaattcttgaatgataaacttttgaagaatcaacaatttgaaggtcaacctcaagatgttgtcaaacttcatgaggaaattagaaccttanaaactacattagccaaactttttaatggaaccgataatcttaacaaactgttaggaaactgtagaagttcctcagaccaatttggaaat

SEQ ID NO: 35283 - DNA, 285 bp, Glycine max
gcgcctatgacagtggcaagccctgaacgaatgattcttgcctatgttgtggcgggctagtcgcacagaactacctcgtgtcaactatactcagagatgcaatctgacaccttatgacacatatcaggtatatattgtcatgactttcaagacatacttactgtggcctcgagagattcaggactgaccattgcccatagtatgaacacatctcgcctactgcattacgtccatacgaaggctccagtcacgagttctctgctaccattgcaccacgacacagtg

SEQ ID NO: 35284 - DNA, 437 bp, Glycine max
  unsure at all n locations
agctntctgaagttntctagttttccaaaccttgaaaacttgtgctattcatcttttcattctcttctcccttagccaaaaagaattcgccaaggactaaccacctgaattctttctgcgtctctcttctcgcttttccaaaagatcaaagaactaaccacctaaattcttttgcgtctgccttctcccttatcaatgaattcaaaacgacacagactgagaattcttttgattcttccctttccctaatacaaaagtgtacaaagaactaaccgcctgagaattcttttgtatgcacatttacaaagtatgagaggtttaaccggctgagatctttgtcttaacacattggagggtacatcctttgtggtacaagtagagggtacatctactagcgtttgactgacaacatgagagggtacatctcttgtggatca

SEQ ID NO: 35285 - DNA, 445 bp, Glycine max
tgcagaattggtcttcgccagtgaaaggatcgatgtgtgttctgattaaaacgcaaatttgatcatcctactaggacgactgagaaaactggggcaaataaagagggtgaggataatggagaaacccatgctgtgactgccattcctgtacgaccaagtttcccaccaacccaacaatatctttactcagccaataacaaaccttctccttacccaccgcccaggtatccacataggccatccctaaatctaccacaaagtctgtctaccgcacttccaatgacgaacaccacctttagcacaaaccaaaaacaccaaccaagaaatgaattttgcagcgagaaagcctgtagaattcaccccaattccagtgtcctatgctgacttgctcccatatctacttgataattcaatggtagccataaccctagccaaggttcatcaa

SEQ ID NO: 35286 - DNA, 347 bp, Glycine max
agcgtttacagctgtacaaaattattatatcttcacatatctcaaggcacaacgattacaatgagattaacagatacatccctatatgtctaacaaattactgttgaagtaacaagttgctggacgatgctgtgtctttgcactgtacgcggattatagctatggagaaagatttttctatgccctataaccagctgcctaccaacataatacatggtatctgtaattatgacacaaaaacctgtgggagaagctgttgtacttgccgatgcgaatcgcggatcgagcagtctgttacacagactgacttcttatatacagtagcacattcatacctatagtgtatc

SEQ ID NO: 35287 - DNA, 420 bp, Glycine max
  unsure at all n locations
ttgattgtccatatgcaagccaattgtggtagctacactcatttgaaacaaacttcatgaattatacaaaacacttatcctttgcatagatactacatgaatcacgtttgcatgcttgattctaaatgcaacaaggatttataaaactgcaaaacctatattttagctaggttcatcacatttatcagcatgttttttttagattttaatctgacacattctattagtgatgggcaacacaaatccatacatagtcatgtgacacgtaatgccaaatctggacaagataaataattttcacaagttaatattaacgataatatttatcttatncatggtcaagcaaatattagagctgaattgctaatagtaagacaaatgaagtctgtatcatacataggcttcaatggataaattcct

SEQ ID NO: 35288 - DNA, 233 bp, Glycine max
atggcgtactcatcacatgtggcactatgtggcagacgggcgatggcgcacaacatgattgttcacatacacgaacagcgcataatcccaacattccctgttgcccacctctcaactgagctgatgtactactacggagaccatatcctacgatctctcaacaccgggaccctatcaatcatttcaagcttcctcatcatgcaaatgcaacatcattcaaacagaacatacta

SEQ ID NO: 35289 - DNA, 440 bp, Glycine max
gtaatatgccctcttcccacggcggagatttcttcttctgttattgcgagatagctgttggcagtgatattattgaccaaccctatgaaaccttctaccgagatgtcttgggccacgtgggcctcgttcaaaacttttattaccagagcccgatgaggctcggagctcatgagtaactccaacagcgagaccctggccgaggttttgttgagctgctcgataaccttgaattggctctgctgaattatacggaggaattcgctggcttcctctagcgacacctcctttataccatcctttttctccggaagacatttcgccggaatatctttattcgaagcgaggggtatttcatcatcttgttcctccaccattttgctatccacttgacgttcgcgggttggactggtaggtccggaggtgcaaacacacgagcgcta

SEQ ID NO: 35290 - DNA, 419 bp, Glycine max
acattttctgcttatattgattatcacagagtggtacctggagatatcgagccggctgttatgaaaccttgcggacttccagtgttgtgctattgccaaaaaccatcttgacaattcgaccacccgggcattatggacttgacaacctgtgatgtacctaagcatgctatctactggcagtcaacagattaatagaacttagaccacacggcatggatgcttgagtgggctggccatctgtgaacttagatagacatgtgggttatggcctgtggtaatctattaccatcgcgggcgtatcgacaacaaggctcagacaggagtaccggacgctaataatggctctggtaattgataccaaccggtgtaaaccactgctcggcctgaacactagtcacctatctagggaacgctctgct

SEQ ID NO: 35291 - DNA, 584 bp, Glycine max
  unsure at all n locations
cctcctaccctantcccacncacgacacgccctcnagactcgatataaagtacaaagcacaancctacacgacaaaaaccgaaagaaattgttgactgcaatcnctcgncgnngcgcgatanaatacacaagcttcgcccgtgtcgcgctcacgaccacgggcaaaccgtacttcttttattattcacccaaagagtgcgctccggatgcgcgttacacaagatacatgatcaggactgctgctctgacgagtccataaccaaccacatatcaacgcaccgttgccatagccaaacacgggtcaccactaggcccgttgcggagcaacgctattgaaactacacctgcgactcacatgccatcaacactacactctctaattcttacgaggactcgctgcacgaaatattatgcgataacaggactatacacattgctcagaaggcctagcccctctcatgcttaaaggaataaactgaagaatatacgcttacgaaccgcgtagagactatcattcaactgaggattttcctcagcccaccacaatgatcaggtctggactatcctacatataacccgctccc

SEQ ID NO: 35292 - DNA, 432 bp, Glycine max
agcttgcatgatttacattctccctctttcttattagaattctcaattcttcttgacatcatcaaaatcttcatgatttacattctccccttttttgatgacgacaaccacctgtaggttaggagcaacaacaaagaaaaaaatatctattcgcatatagtttactcccccttggttttgcaatgattgcttatatgagacagttgaagatttcatattcttcttgtgtaaacaaattgtctcataaacaatagataatttttcttacttgatgaactaccatctattgaaactctatctactgtggatgggatataaggccctatttcttatgtaaacaaattgtctcataaacaatagataatcattcttactatcttatcttttatctttctctgccgctttgtcaacatcaaacacacatcatgaata

SEQ ID NO: 35293 - DNA, 409 bp, Glycine max
  unsure at all n locations
tgatctcctcgaggaaagactgagagccgtggaatgttttgttgactatccgttcgcagacatgacggatctttgcttagtacccgacgttgctatccncccgaagttcatagggccgaacttcgacaagtatacacggacgacttgtcccataaaccatctcaagatgtactgtcgcaagatgggcgcacactctaaggatgagaagctattaatacacttctctcaagatagcttggccggagccgcggtagtgtggtacactaatttggaagcttcccgtattcgtacttggaaggatctgattactgccttgctaaggcaatatcagtacaattccgatatggctcccgaccgcactcaactgcagaatatgttcaagaaagagggcgaaacctttacagaatat

SEQ ID NO: 35294 - DNA, 422 bp, Glycine max
agcttaactcctgctatgatcaactacctattatctcatatcaaagttaacgtttatctttgattgatcaactaatgcaaaaatcaaaattatttattttaaaaaaataaaacaattaaaatgtcttgatttagaaatagggaaaccaaaatcgatgatataaaattataggggacctaaaatataatttaactttcttttttcatgaaaatcacttttattttaaattattaatttaaatgtgaccgagtccatttttttttattaaaaacatgtttgttcgaatatttgaaaggaaaaaaactttaaaagaagtcacatgccttattattttaagagattactttgtgtagcctttatgattattttgagaaataaaagttgaaattaatattaatttctaagtaattctcgttataatt

SEQ ID NO: 35295 - DNA, 445 bp, Glycine max
  unsure at all n locations
cgcttgagctggtatctgngttaaaaaanaattcgcatttttctttgttggagcaattgggaagaatgagcagtggcagatggaggcagctagatacctgaactgtggagttctgtcctttccttttgcatacttgggtatccccattggggataatccaagatgtagtgatctttgggatcctatagtcagaaaattcgagagaaaattagcttcttggaaacaccaacatatttcatttggggggagagtgacactcataaatgcagccctagcagcaatccctatctactttttttcctttattagggtaccttcaagagtaatatccagattggaagcaattcagaggcaatctctatggngaggaggtatggatcagagaaagattgcttgggttaattggaaaacagtctacaatccaaaggatatatgaggacttggc

SEQ ID NO: 35296 - DNA, 448 bp, Glycine max
  unsure at all n locations
agcttgcttctacagannagaaatctcaaggatcgcaggtcgcttggggactggatgtaggcacgggttgttgccgaaccaatataaaactcttgtgtttgttttcttcttccatacactctttaatttccgctgtgcattttaattatcgctattacttttggttaagttttgtttttctattctttattttctcaactttgtagtaaaagcctaattgaatttagtaacattaagaaggatagatttttaattagtaaaggtctattaataattaattcaacctccccccccccctccttcttaattattctgaggccacttgttgcaacaagtggtatcagagcaggtatcttgtagaaagtttaaccacttcaagattcatggcctcttcaaattctttgtttcctgaaggaaattccatccataggccacctatcttcaatgg

SEQ ID NO: 35297 - DNA, 402 bp, Glycine max
  unsure at all n locations
atggaagtactaagtatttattacctatacttaacagaaaatacttataacacaacaaaataaccataaattggaagagtttgatacaatttacacaagttttatacacaaaagttagtcgtgttcaccgactaacaccatgcagcgcaaagggaagcatctcgtgccaatccttgtatgacacggtcatcttctgaactatatcttcttgatattnttattagcggcctcaactgcctcattcatcttaagccagtaaggcatggaattatggtgttagatnttgaaatcctcacacatctccttcatcatcttgttgttcagattggtggcattgaaggtgataattttccttagcaacccatatcggcaaattatctcccttntgatgaaactaatcac

SEQ ID NO: 35298 - DNA, 438 bp, Glycine max
agctgctaaaagtataggaagcaacattagtattgcactattccattcccataaaaataggcgttgttcacactgtctaagcataacaatagcctgcccattacttctagcacccctatattaaaattcctatgctatccttctttatttttgaatagtcattccgcacatgagtacgtattttgaagtatctattttggaatatgacttcaatattctgcaataagtcttcgaattacctatacactttcggaatacctattatagaatatgactttcatgtttcaaaataattattctaaaaataggtttccaaaatatatacacacttcccaacatagttattctagacatatgaaaatcatatttccatactacggtggaaaattcgaagaacgatctcaagtgaaagcggctatggattcataccaataacat

SEQ ID NO: 35299 - DNA, 302 bp, Glycine max
tatgttaatcaattagactttatccgtatccttgtggatgtataccttgaatactgccatgtagttgttgaacatggtttctagtaatgtaattccaaagacacctcttgagctgtagacaaataggatacctactataatgcacctgcatgtatggggttgccaggcagatataacgatttataatccgcaagaaagaaaattggatgcaagaacaatcagtggatatttcattggttatccagaaaagttaaaagggtgtatgttctattgtactactcatagatgagaactgacaaact

SEQ ID NO: 35300 - DNA, 443 bp, Glycine max
agctctcaaccgttcttcgacgttcttcattctttcttcatcgttcttctatcttcaacgggtaagtacctcgaaccaagcttttcgattcattctatgtacccgtagtggtccacattgtgtttcgtgcatttttattctcgttttgtttactttttataccccctgttgacgtgcttaagccattttacttaagtcatttctcgcttaacttaaaaataaaataaatttccaccgaacgtttgaattgtattatccattaacttcggttaaaataaattccgaccgttcggtcgtgccgtaaccacgttggaaatcaaaaagaggtaaaaaataatataataatcaaaaagacatcttttagtaaaataaagcggaaaatcaatcggacgttttctctttgggatttctcattcttaatcgaatcgattaataactaaagt

SEQ ID NO: 35301 - DNA, 452 bp, Glycine max
  unsure at all n locations
tctctctctaactctcactctcacttagagaaggtgggaactctattaggcacgcatgctttgcattggtgaaaacggataacaaaggattacttctttgtgtattacccatgtaaaaaagtcaactttttgatgatacattcatccaaaatttcattgacaatttcctccaactacgtcagcaacaaacataggaaattttttgttgacaaatccgtccacagatgccacgcagaacattccatttgctttgacagagatatttaatgtttggactaaattgtcgcactttccttaaatccaaggacaatttttttttttatcttttcagtactaaagtgttaactcattacaaattcagggattgaagtgactaatttatacttaattntgtaggtcgtatactttttacttataatggttcaaatcctctaatactcaatgtttaacaa

SEQ ID NO: 35302 - DNA, 434 bp, Glycine max
agctgtgccgtgatggtgcatttgaaattggtgattgggtttatgttcgccttcgtccctaccgccagacgtccatagcgtcgacttacaccaagctttccaaaagattttatggcccattccaggtactggatcacataggcccagtggcttacaagcttcagctgccactttcttcccgcatacatccagctttccatgtatccctcttgaaaccgcatcttgggccatcctcgactacaactgccacattgccatctacagggaacaaccaccaactcttggtctctcctttatccattctggattggaagtgggaccattcatcttccccacctaacaagaaagtccttgtttagtgggatggcttagcatcgaaggatacttcatgggaactatgggacaagctgcgtgttgcctatgaccttgaggac

SEQ ID NO: 35303 - DNA, 451 bp, Glycine max
  unsure at all n locations
ntgatgaaagtgcagtctgaaggtagccaaatacgccttctatgcttaacgaagttgggcgttaacacatgatcagggtagtctgctgggttcgcatgaaccttctcccttaaagtgatgaagtcattatgcgactgcaactccttatagagatcttcaagaaacacaaaatgaggcattgagaggatgaaacatgaggtactaggtaattctgaacatcgcgataacgcgtctgcaaccatattagttttgcctattcgatattgtatagagtaatcaaatcccaacaatcgtgccaaatatcagtgctgttccagcgtttgaatggcctggctcatcaattctttcaagcttctatgatcagtcaggattataaagtggtgccccataaggtattgcctccatttcttaacagcagtggtaatcgcagtgagttcacgaacataagtgg

SEQ ID NO: 35304 - DNA, 450 bp, Glycine max
  unsure at all n locations
tgttagactgtttcatacaagatatggaaacaaacaaatattcttctatatcgcangtctcccagaacaggtcagaactttgaaacatatatgaatatgatgatgactatgaaactgatattgattccaataaagcatccatgtactctttaagtttcaattttgtaattgcaccttccattctgctttctggaacttcctgcccgttcttgaagagtattaatgtcggtagtccataaactttatactcttaaattacttgcgggttgacatcatgatcaatctttacaaccgttaatctgtcttcatattcctgcaagttattattataaaaaataatcatggtccaggggagacaaattaagatcctaaagatcacttgacaatagttcttaggaaaatcatactatttgtttcacaccatgctatccccaccatatatagcctata

SEQ ID NO: 35305 - DNA, 282 bp, Glycine max
ctcattgagttcttatggctatagagaacgagcaaagatccgcatggtgatcggcgaaccaacatagaccactgactcttgcaacatgggcagatgcacatctttagattcatggcgagcatgagttactatggtgaccactgcatcaagagttccctcaagctatttattatccgatcatgaagatgaaacgagggccacctgatggactcctcgatagaaaagagcatcatttcttgcactgaagtgtagggagttggaagccatcctctcaatcaaatt

SEQ ID NO: 35306 - DNA, 408 bp, Glycine max
  unsure at all n locations
tcaagctgacagagacttcagaaagatgtataatctcattcttatctgngagctctcattgataatttgtacatctattcaagcttacttacttcacaatgtctttgaacatgctgtgttttttttaccatatacccgactcgaaatatcctgctaaatgtatgtctttatgaaaattagtccatgcgataattagaaggattaagccatctatagcttaagtgccacgttctaatgccaaagtattatttggagacaatatttgtattcatatgaacttgttacccttcttaggtccttctctccttgaatgccattgtcatggccaccttggctgactctgtacactatggctgacttatatatatcatcaaaccacttaaggcacaagcacatgttttatctcac

SEQ ID NO: 35307 - DNA, 494 bp, Glycine max
  unsure at all n locations
gcacaacgtttgaccgttgaacctttganacattcgagatccttagaggcacctgaagcatgcagccttgcagccagagcctcttgaatatgtatcacgtttgtcaaataagccttacgtttcacagctaggacgctcctgcgattagatcgacacaaaaagagactccatactctcgctcgagaaattattccatttgcgagaggtcatttcatggactaagctccgagcgtgatttgatgcattgcttttacctgttggtcgcgatttttattaacacggaggagaaagtatgaacaacactgatctattaatttcaagattatcacattgaacatatacaccctgtcatcggagtttccatactgcataaaagagatgacatcgcgcgttctaaaccactacagaatgattcacaccctctcgtgcacccgatctcccaaggtagcaactttgagatgtgctgaggagacgcctttagaaagtgtccccta

SEQ ID NO: 35308 - DNA, 365 bp, Glycine max
  unsure at all n locations
tctcgatatgttatgcgtctgaatcggacatgcgagtgtggttttgtgatcatnttaatatcccgagagcttccgttgttcaatttctagcatctcgatacgctatgtgcctgaatcgggcatgcgagtgaaaagttatgaccatgtgaatttctcgagagcttacgtagttaaatttctagcggcatgatacactatgcgcgtgaatctgacatgcgagtgaaaagttaagagcattttaatttctagagagactgcgatggtgaaagtcgagcgacatgatgtgtcatgtgcctgaatcggacatgcgcataatacgttatgaccatatgaatctctccggagcatctgtcgtgcaattacta

SEQ ID NO: 35309 - DNA, 336 bp, Glycine max
agcttgtcaggcaatactggcttgctggcctttgtgtgatgtcaacgacaccaaaggacgaggcatgcagcctgctatgagaagcctatggaactcaagtgctacacagtcgaaagcagtgctaagaaagcctccatcagggcgagcactatactccttgacctgcagctcatgccatattcacaaagacatcttcacattcaacaggtaaagctcattggtgaccgcggtgcgctggaagagactcaaaccgtacctcaaccaaacaactgttaacccgcaactatcagggagaagcttcggtgcttgctcaagctacgttgcgcctgacacata

SEQ ID NO: 35310 - DNA, 424 bp, Glycine max
tgatttcttggcctgcttgtgctcctttttcggtgttctgtttatttcagtgcctttaggccttggaatagcggtaagataggaattccttaatctgcttcctgccattagaaacctaaaattcattgtatgctaatactatgtgtttaatattactgacttcgccaaaatcttcaggtggcaatatcagtcttcaagatcttgcttcatgtctctaggccaaacacactggttttggggaatataccagggacgccaatattccacaacctataccaatatagagaagctttgaggatcccttcatttatcattttggctgttgagtctcccatctactttgctaattcaacgtacctacaagaaaggttagataaagcgacttgtagattggcgatttgtgaatgcttactacatttcaaat

SEQ ID NO: 35311 - DNA, 439 bp, Glycine max
  unsure at all n locations
agctntgatggtgtcgagaagatatcacatgtttgtcattatcaaaaaaggagagaatgtgaatgtatgtatacatgattctgatgacgtcaaaagaagaatcaaacaaggctcattttgcttcaagattaatacaagattgtttcaataaacaaagccttgattcaagatttcttcaagatcaagccttgcctcaaaatgaaaagatttcaagtcatccaaggcacatgtaatcgattaccaaggcacatgaaagtgtgcaatcgactacacatcatatgtaaggcgccatacctatactggagtgatcgattatacaggagtgatcgattacacattaggtcctaaggcaatgctctcactacaatctacccaacatagaggtgtcctacatcttctaccatacaatgcctcgtaaggcgccatacctatactggag

SEQ ID NO: 35312 - DNA, 449 bp, Glycine max
taaaggagtactcatagctggtgtatttacccccaaggtctatactctaaagagtctgtcagggcctttctcttctaatttaggaccaatccaaaaaacattttaacacatagactctatctatgaactatacaaaatacacaaatcttctattgttctcaaaataattttaactcatcgtgcctcaaagtgatcaactttgttgggttaccatagtggatcccatcacaatactcgttgcacattaactcgtcgcccttaaagggtcttacaatccattgattgtatgattcatagctcacaactcaatgcacacaacatctcaatacacatgtgatctcacaatttaacacatagtcaacttgtcacttacacacaattcatcacactttcataatcctaatacatcatgttatcaagcctcatgcatcatatacatatcacacatt

SEQ ID NO: 35313 - DNA, 285 bp, Glycine max
agctcctaacgcggtttcagcgattttgaattattggatcagccatataacattctttaagcgctgagccatcggatatttctggctttactatgttacattttctgcaccatcaacatcaatatgaaacagtattactatctgccgacattgtcacatggactttttagattacactgatagcatgccactttttaagtttatactgacgctacctgagattgtatcactgttgtggtacactaccacgattgcgtgaatcgcatctaccactcatcatttaaa

SEQ ID NO: 35314 - DNA, 427 bp, Glycine max
  unsure at all n locations
cgaatacaatgaaactntctaacttagcaaagcttatattctctcaattcgcccaagtttctttcgtccagttaaactgatagctttaaaacactttgttcatttttgtctcagattattctcttgtaattcgaaaatcttaacacaaacatcttcaagctttatatagactttagagctttgatccgttgagagatatcaagtagccattgtctaatagcttgagcattttacataaggccattactatacagagaaagtgtgggaaccacaaacactttttgtagcatatatttagagaagtacaacctgctagtgtcatcttgtgctcagagctgactttcagtgcacaaatcaaatgtaatgttaacaacatatgacaaanataattaagaatgtcaagacangatcattaaatcttcctttt

SEQ ID NO: 35315 - DNA, 432 bp, Glycine max
  unsure at all n locations
agcttatagcctttgtgaatctgaggcacatctttgaaatgatacataactctcatgtaaaggatcctcattcgattatatataactaaaaggaactcttcactctcacttgatatatttcttccatttgcgagaggtcatttttgggactaagcttgcagtgttttttcttgctctccttttacctgttgttgcagatttttataaacatggaagagtaagtatgaaatagactgtcctattattttcaagttaattacttcttacatatataccatgtcaatgtacttccactactgcaaaaatgaaatacaacgacggttcttaagcacattcaaagatgattcanaaccatctttgaagccaacatcgtcgaaagtcaagactttngaagatggttcctaacaaacctccttagaaaaatgtatcatt

SEQ ID NO: 35316 - DNA, 437 bp, Glycine max
  unsure at all n locations
tgctccacccggatcacctctcaagtaaactaatgggggggatatatagagatgaataattgaanaataataagcactagttattggggtgcacagtaatttccattcatttcatgtatcattcaatacctaattcacacagtaaactccactcactctctacatattanatattctcaatgtataacagatattntttgtgacactggattccattcccacgtcttattggtagtattatagaagatgtgcagtaatacgggtagtctcttgacatgtgtataccgtgtacagctcccataaaataaagagtaccacataatcatatgatcaatttcactgattctctcatgcttctattntatcttttggtgaaatattcctttgctttnttcgaattntacactccgagagaaatataaatcctgataggctag

SEQ ID NO: 35317 - DNA, 439 bp, Glycine max
gatctctaagcgactgagcatgcaagctttgtactccactaaatttgccttttgttgaccaaagctaataccgctgacaaccttgtgaaagctgtgcacccaggatacaaaggcatctttgaatcattttctattttctcatacaaaggtacatgtgcttgttgaaatctgtcctgccccaaattgcaaatcatgtcttctatacggtatcccatgtctacatcgactgactcagggtgagagactgatggcttgtttggcaattccccatgccatatccattttgtgtaatttggaatgatcctatgacatatattgactggtgtctcctattcccacattttacgcatggacagaaaaatttaccccgcacacatggtgcattgagtttagtaaattggaggaattggtcaactctattctcatactcgtcactgat

SEQ ID NO: 35318 - DNA, 439 bp, Glycine max
  unsure at all n locations
tgtgccttttcacgtctggaatatgaatgtagcatatagattcaaagacccttaggtgctttgttgatggcttcttcccgatccaagcttcaattggagtcttgtcttttacagacttagttggacatctgttgagtatgtaaacagcagtgtagactgcttcagcccagaatgtgttaggtagtcccttctccttgagcatcgatctagccatctccataactgtgcgattctttctctcggacactccattttgttgagaagaatatgcgactgtaagttgtcgctcaatgccttcatcctcacaaaatctttcaaactcgcgagaggtgtactctttgctgcgataacttcttagtacttttatccgttttccactttgattntcagcaagggccttgaactttttgaatactccaaagacttctgattnttcttt

SEQ ID NO: 35319 - DNA, 442 bp, Glycine max
agcttgcttctgaagcttctatggaggtcggatctttgagcttcattgttgtccttcaatggcgattttccaccatgcagaaggcatcatcctctaggaaataaggcatggaagaaggagcttcaccatcaagagagtgtcttggataagaagctcatagaggaagcttcaatggaggaaaagaaagagagagagggagggagcacgaaattgaaggaggaaaagagagagagaagttgaactttgaagtatgtctcacaagactctcattcatcaaagtttaaggtagtcaatacatagcaatttaagttgcatggaccatttaagttggctcacaaatcccacacatttgaaggacctaagcttaatacatagcaattcgaagatttctatatatttaacatgtgagtagggtgtgataaaaccactctacacaacatgt

SEQ ID NO: 35320 - DNA, 367 bp, Glycine max
  unsure at all n locations
ttcataagtgagatcaggtgcagtcatctccctaagagtcctctcacgatgtggagggtgagccatgttctcagtatataaattattagtggaatgctcaacatcagaatattcataatcaccctcaagagaatgctcacaatgcacataatgaccaggatgcacagtatgcctaattaatctatgaaaggatctatctatttcaagatcaaagggttgtaaatcacctagaatgacgctagtcatgcactatatgcagcanataatgtgtttcttaacaagcacctaacaagggggtaaaactacaactatactcagacgatatcataatgagcttatattttgtgaggaacaccctatgatcatg

SEQ ID NO: 35321 - DNA, 436 bp, Glycine max
agcttgtacgcacatcgttcgcgtgtatgatattcactccattagtttgaagtagaggagagcttcaaccttataacgcaacgtggcggacaaaagtgggcaattaacttgaatggtcatcattgtcaatgcggaaggtattctgcgcttcactatccatgttcacacattattgcagcttgtggttacgtgatcatgaactactatcaatatatagatgttgtttatacaaacgagcacatcttaaaagcttactccgcacaatggtggcctcttgagaatgaagcagctattcctccttctgatgacgcatggacacttatccctgatccaactacaattcgtgcgaaaggtcggccaaaatcaacaaggataagaaatgagatggattgcgtcgaaccctctgagcaccgaccaaaatgtagtagatgtggag

SEQ ID NO: 35322 - DNA, 417 bp, Glycine max
  unsure at all n locations
ctcaagcttagtgacatctgngacttgatcttaagcgaagatgttcgcatgatttattcangagaattttccagtcatgttatcaattcaacattgaatactgaacgcaagggaacgactacccataacggtcagaatggtcgacgcatatcaaagcccagagggaaaggtcatagaaaatttcacagtgacgttacttgctggaattgtgacaagaaaggtctctttatcaatccgtgcatggcaccatagatgaacaagtcgcacaataacaagaagcacgatgatgatgaatccgcatatgcatcaactgatgaacttgatgatgcattatttgcagttggatagtcctgttgatcatggacatggactaggtgtgtcgtttacactactcctctaaagattattgctaactat

SEQ ID NO: 35323 - DNA, 433 bp, Glycine max
agcttgccgctggagctgacccatcaattgttctaactcttttagactgttgatccctaggctcttgaccttgacttgatagaacctctttttaagcaaaggcgtttgacttgatcccatgttttactaaagtgaaacaaaatctaacgcgaatcagaactccgacatctatcatgggtggaatggatgaatgcgtgaagaaatgcgtatgatatagatgcaatttatgaacacgggagcccgggaaattgtctccttcttagatacaacgtcttggggtagcaaagtgtccgacgtatgtatttaagaaggtgacacggaccctccgttggtttgccaaagacaggggatatagacagaacccgtgcatgatgcatatgcgaaaggcacaacactggaatgtacatattatgacaatattcacaaaatataa

SEQ ID NO: 35324 - DNA, 453 bp, Glycine max
  unsure at all n locations
ntgagaaacatgcaaccctttggcatcatcaaaacattaagttttatcctttgtctacaatctccccctttttgatgatgacaatcctgaaatcaagacaagctatatacaagatgatagcacgttcacacagcccttactccccatatcttttggcatgtatgcctaactttaatgatttttaatgattttaattgatttctaacccaagttctctccccctttggcaacatcaaaaagaactaagcaagacaatcaatagctaaacagagccaaacattaaaccaaaataagtccatacattgtcataaccaaccaaagcaaagtccagaaatataataatagtgcaagattacgataactagagcaacaaatagccaaataaacggcgataaaccaaaagtactaataatacttaatcactaataatacttagtcataatacttaagcta

SEQ ID NO: 35325 - DNA, 442 bp, Glycine max
agcttagacgaacttgttcgagtcgagatgactttattatttatttggacaagttcgaatataatgtagaagatagtgaatgtgagccttttacccctttgaaaggcttgtatttaaaaatgttttaaaaatacttttaattaaatatttgaatttttattcctttattaatatatatgtgaggggtagaggatgtcacacaaggcatatttaatgtgagcctttttttactttattgtccactcctaaccatgcaaatcaatggtgagttgttgatctagtttcttaaataatagtattataatgggaacacacatgaataaacaatatttcttatactgtttcaactacgtgaataaggatccctctagtttaattaattagtgctaataacttatacgtgtaacgactacagctagaacctagaagttgcatgcctttt

SEQ ID NO: 35326 - DNA, 522 bp, Glycine max
  unsure at all n locations
acccacaccccgaccacgcacaaacacaaccgccaaaaactccaaaaaacaggaatgctgctcctgncgcaccaaaaaaaccagccgcaggcacgggacccagacaagggngcgacccttcgtcgcgccacgatgacaatcggcaaaaggcgacaccgcgacagccagaacacctcaagccccggacggccaccagcgccagaaccgacgtgcccccacacagcccacacgcatcaacctaccacaacacgggccgcaccatacccccaaagccaaccgaccagggcagcaacacaacaccgcaaacgcaccaaagaaacacaacgcaagacagaccggcatacgcagagaaacccggacccaaacccaaccaaaagcacacccttgacagcaccagaccccaacaccaagtacctgcatgcaaaccacgacacgaccgaccgaccgtcaacggaacaggaagaactacaccaacagcccgcgtctgcacgagggacagcagaaaacaacacagccaccccg

SEQ ID NO: 35327 - DNA, 393 bp, Glycine max
  unsure at all n locations
agctnttgttccatttttataaaaaagagaagttctgaaactcatcacgttgtctaaaaaagggtcttgaggtggatctaagtgctctgatcattcattagcataacatattcatgatttgttggcatgctcaccactgtttgtttctttaggaaactcgccataactaaaaaagcgcaaaggcacccctataacacccgatccaaaagtaagatgggtaaggaagagggagtgcaagaacagatgaaggtcgacatgtcggctttaaaagatcaatggcttctatgacggaggccatgctaaaaattcaaaaatcaatagaagacaatgctacggcggccgcttncaacacaactagggaagcggaatcggtgctacaacccgcaatgaact

SEQ ID NO: 35328 - DNA, 438 bp, Glycine max
tgaatagcctcaagtttaggggcaaaccgtattctttgaattatagagccaaagaatgtgctctggaagcgtgattcaaaagatttatgattaggactgcttctttgtcgagtctatcaccaatctcaaatcaatgttcctttgttataattaattagaggttactattaggcacgttgtggtgtaactctattaataatacacatgcatttcacattctatcaataatacattttctaattctctgagttcctctcttccgttattattatgttctatcatgtttctcaacatttctcaaaagtcttagcacctataataattaaaggaataaatttaagaatataatgcttatgaacagcgtatagacttttattcaactgaatatttccttcatccaaaaacaattattatttttgtacttttcttttaagtaat

SEQ ID NO: 35329 - DNA, 429 bp, Glycine max
agcttgacgactgtggactgattatattctcttatgaaatgatgatcaatggcaatgtgcttagatcgttcatgatgagcaggattcgaagcaagacttatagcagatgtattatcacataataacatcgcagatggcacatcaacttcagagtgaagaagtaacctgtgtaaccaaacactttcactattaacacacgacaagacacgatattcagctatagtggatgattctgaaacagtgggttgtttcttagaacgccaagaaagaaggttggttcccaaaaagacacaatagccagaagtggatcttctagtatcaacacaattggcccaatcagcatccggacaggcactgaggtcgagagagttctgagcacggaataacaaaccttgtccaggagcacatttgatatactgcataagatga

SEQ ID NO: 35330 - DNA, 405 bp, Glycine max
  unsure at all n locations
agcttctaaactntatacaagaatgaagctctgataccacttgttagacaagtggcctcaaatatctacagaaggtgggggggttgaattaacatatcacaatcttttctaaattaaaaattctattttgattctaacccatatcccaagatttctttcaaaaatgaactcctaaataattatgcaaattaatcttactaaatagaaacaataagcaatatacaataaaagagtttaagggaagatagattgcacactctgatttatactggtccggccacacccttgtgcctacgtacagtctccaaacaacccgcttgagagtttcactatcttgcaaaagccctttacaagttctaaaccacacaaggacaacccttcctttgtgttaaaattctttacaac

SEQ ID NO: 35331 - DNA, 187 bp, Glycine max
tctagccaaatggacttaccttgaattaatcctttgttatctctcttttgagccttgtttccctttccttggtttgaagctcactacaagccttaagtgaaaaaccatgatatcaccatatccttaaggaattttggagctttggaattgttttgggaataagtgtgtgtgtgtgtggggggggggg

SEQ ID NO: 35332 - DNA, 494 bp, Glycine max
cgcgcgaccgtttgaacacctttcgagaccctgggaggctctagagatgctctgcaggcgtgctgcctgcctgctagcttgtgaccacacaagatgctctatcatctcttataccgtttgaccactcgcatgtactacaggacgaggttgatcatcactgctatccaagaccatatacttggctccttgatcatctagcgagcaccattacgtaacctaaactctgcttcctcatatatcataagtggaagggaggaatgcatgaacatctgcacatgatatcgatgcccttatttaacacgggaacccggtatatcagttgatttgatagacaacattggttactcacatagacggactattgtttatgatagcgacacagacactcactgctttaacaagacgcttatatagaagaactcctgcaaatcatatgttatagcacaaactgtaagtcatggacgaagtatgccaaaaagagctcgcggacatcc

SEQ ID NO: 35333 - DNA, 451 bp, Glycine max
  unsure at all n locations
tgtaggattatggngtacccatcacatgtggtactatgtggttgtcgggcgatggtgcacaacaagttttccacatccacaaatcgcacataaacccacaatcccctgttgcccacctccaactgagctcacgtactcccacgtagcccatatcctcgtttctctcaacaccgggtccccatcaatcctcccaagcttccccaacatccaagtaattcaacattcaaacagcacaaactatcacagccaagaaaacagggcaaaggcagaaaactctgcccaaaacaccaaccaaaatcacagcttttcccacttaaagaccccagtaacatttccttcgttccaattcgttaaccgttggatcgactcanaaattntactggaagtctctagtacataagcctacattntgaccgttgggatttgctagcaaatatccagaaatcattct

SEQ ID NO: 35334 - DNA, 428 bp, Glycine max
  unsure at all n locations
agcttagtgtaacattaagcttcaacttacttgagnagtcaggcttagcgcaacaggtgcactaagcgcacttccaagaattcanaacccgtaaaagattggcgcttagcgcttcctgacccgctaagcccagcttaaaaactcaagttacaaaatggatcaagggcttagggcagcatagcacgcttagcgctgctacaataaaatttttcccgagaagaagtggtgcttagcgcatcatccacgctaagcccactggttaaagttcaattaccgcaaagatgtggggcttagcacagtgttgtgcgcttagctaaactattcaaccaaccaatcaggggtctatgcgcttagcgcgagcaagcttggcttagcgtgtgaagactaagcgcttagcggatagacaatcgcaaaaaaatttctaagtc

SEQ ID NO: 35335 - DNA, 443 bp, Glycine max
  unsure at all n locations
tgaaggtgtgtagcccaccatcttttcatagttgaatattgttaatgtgtctactattattgtcatcatctttttctccgtcattgaggtgccacttgagctgccaggtctctccacctttgggcgtattcttttgaagaatttgtgccccctttttgcacatgttttgtagttgcatcctatccgaagccattataccgacactgcctaacgaaggcaaccattaggtcctcccaggaatggactcgggaaggttccaagttagtgtaccaggtaacaactaccccagtaagactttcttggaaggaatgtatcaacaattcctcttcttttgcgtatgcccgcatcttccgacaatacatctttagatggttcttggggcaagtaatccccttgtacttgtcanagtccagcaccttgaacttgagaggggtgatgatatt

SEQ ID NO: 35336 - DNA, 394 bp, Glycine max
  unsure at all n locations
agcttgagatgatgtagtgtagaagggtgaatcttcctgcttttattcgttgaccacagagtggtacctggagatatgtcgcggnggtcaggagaccttggggacatcaggtggggtgctattgcccaaaaccaagcttgaccaatctcgacccaacccgggcatagtcggtcagtgagaacctgtgatgtacctaaacaggcgagctcctggcagtcaacagataaaaggaacaaagaccacatagcaaggaggcttgtggtggctggccagctgtgaaacttgattgatatgtgagatatggtctctggtaatcgattaccaagggtgggtaatcgattacaaggtttaaaaatgaagacaggaggctaagatggtctctggtcatcgatta

SEQ ID NO: 35337 - DNA, 395 bp, Glycine max
  unsure at all n locations
ntataagcgcgggtctgtgagacgaaggtcaagtgtgtttcgatatacgaagatgatgttccgagtacattggatttggtacgaccatgccctcctgatttccagctgggaaattggcgagtggaggaacgccccggcatttacgcaacgagcataatgtaaacctttacggttttaaaagctctatagttgggcctaggctttagagattttcctattgttaaggctttgtgtcttttgtttttgaatttataatacaaggatctttcttcatctgttcctacgtctctacccattctcattcatttgcatgtttacttctttttctgaaatggcagatccaatgacgagtcccccgaaggtactaatacctgagacccgcctatcgacttcga

SEQ ID NO: 35338 - DNA, 417 bp, Glycine max
gtcgcctgcagcatgcaagctctgaggagttaacaatattctcatgttgtcatcatcggaagcgaatatgtgaatgtatgtatacatgatctcgatgatgtcacagacgaatctaacaaggctgcttcataggataagcatttgcttcaagaataattcatgattgcttcaacaaacaaagccttgcttcaagattcactaatgaccaagccttgccttataacaaagtgctttcaagacatgcagggctctggtaatcgactatcaggatgcgtcatcgaccaccagaggacagggtcgagacatactcgatgaacacgctctgaacttgactctctacctgtaatcgataccatatgtctgcactccattaccatcaacggaactttggaactctacattccaaagtcataaccc

SEQ ID NO: 35339 - DNA, 590 bp, Glycine max
  unsure at all n locations
accgctcccttacacttacctaaccaacgctaatctataacatgcatctaccaccaanaaaaaacganaaatttgtagctgcatccntagcnannacgngaactatanactactcagcttggagcgtagaagaaactactgtaatggcatcgttattatctatgtatgagcaacaacgcattacagctgcgctaagaatgaacatcacactttcacttcttctcttatgagtgtactcgcattatagctactcccgtgaatctctggtgcctacagtatccttctacaaacttaagttgaatctttacccaatgacctttccacgaagctaacgccttattctgtaagactacatcgtattctcgcacatgcgaatcggaattcgtatatcgacagtcacacaatatgcatgcgtgtaacgtatactcaactaacctccttagaacacaagatgatactcggtgttattaccgctaggtacactcatcatatccgagcttttagctgaatgagtgctacgccaaaactacccagatccatntcttcttttgctaacgcgactgatccgagagggcgaccgacgatcgacg

SEQ ID NO: 35340 - DNA, 435 bp, Glycine max
  unsure at all n locations
naagctttgcagtgaagagtgatgttgtttacttggtttacttcttcatcttcgtcagaatcaccgctccttggcatcaccattcatgtggttggacttctaagacgtgcttcacaacaactatgggtaccgccatgagtgcaccgtgacttaatgtcagagtatttcctcgtcagaccattgatgtaatggtggagcaactcagatggagagatggaggacatctcagatctgaaaggggaggaagaagaagggataaaaagagagaaaaaaaaaaaaccaggggaatgtccggaaagggggggaaaaaaaaaagagaataagtcaaagaaaaaaaaagaataaattcacggtacatgtcatgtcactgatatcttctatgtgactatatatacttgtatcactgacattatgagaaaaaaataatttacagat

SEQ ID NO: 35341 - DNA, 447 bp, Glycine max
  unsure at all n locations
cttgtgtaatcgattacactgatctggtaatcgattaccagttattgtttctgaataaatcaaaagatgtaactcttcaaatggtttttgactttttcaaattggtttcaagtttttttaaaagtcataactcttctaaatggtcctcttgaccagacatgaagagtctataaaagcaaggctttgttttgcattttataacaatccaatcaatctaatacaatcctttactaggcttgaatctctntgaacttcttcttcttctttgtgccaaaagctttccaaagttttctggttttctaaaccttgaaaacttgtgctattcattcttttcatctcttctccctttgccaaaaagaatttgccaaggactaaccgcctgaattctttntgtgtctctcttctcccttttccaaaagaacgaaggactaaccgcctgaattcttt

SEQ ID NO: 35342 - DNA, 430 bp, Glycine max
  unsure at all n locations
agctntgcagatttggtcttcgccagagaaaggatcgaagtgggtctgaaaagaggcaaatttaatcatcctgcttgggcgaatgagaaaactggggcaattgaagaaggtgaggatgagggagaaacccatgctgtgactgccattcctatacgaccaagtttcccaccaaaccaacaatgtcattactcagccaatgacaaaccctctccttacccaccacccagttatccacaaaggccatccctaaatcaaccacaaagcctgtctaccacacttccaataacgaataacacttttagcacagaccaaaacaccaaccaagaaaatgaatttgcagcgaataagcctgtangttcaccccanattccggtgtcatatgctanactngctcccatatctacttgatactgcaatggtagccataacc

SEQ ID NO: 35343 - DNA, 428 bp, Glycine max
  unsure at all n locations
atacaaaggtgttacaagagaacctatctgtttctaattatatgggccatcaaatctatcatgggnngacagnaattgattagcccatgaatctcctcgggagccgtacacacttcggccatggcttttgctttggctaatagacgcgggaggtcttgacttccattcaaggtcaaggcgaacctatccatccacatagtcgcttcttgatgcaatgcatcaatcaccctccctcttgcttcttttttggcgtacacttgtgcaaaatcctccgctagctcttgttcatgggtcacagactggttcaactcttccttgtattgccctatgatagctagcatgctgtgctctgcggcttccaagtgttgagccaaactcctcttggaccttgcgcacgcagctaactcttgttttaagatcatgccatg

SEQ ID NO: 35344 - DNA, 412 bp, Glycine max
agctctgattatatggtcttcaccgacgaaaggattaatgtgggtctaacaaaaggcacatttagtcatcctacttacaccactgacaaaactggggcacaagaagagggtgaggactgaagagaagcccgtgctgtgactgccattccaatacagccaagtttcccaccaacccaacaatgtcattactcagccaataacaaaccttcttcttacccaccgcccagatatccacgaatgccatccctaatatcaaccacaaagcctacctaccgcacttccaatgacaaacaccacctttagtgtaaaccaccacaccaaccaagacatgaatttcgagcgagagggccttagaattcaccccaagttcagtgtcctatgctaactatgctccatatttacttgataattc

SEQ ID NO: 35345 - DNA, 246 bp, Glycine max
agctcgaatttgaacaacagaagctcttgagaaattcaaatggccataacttatcacacggaagcccgaatcatgcgcataatatatcgagaccctcgaaattgctcatcaggaagccctcaagaaagacaaatggtgataactcttcaaacggaagtcccaatcacgagcatatatatatcgagaagcttgaaattgaacaatggacgctcttcagaaattcagtcagtcatatctcatcacacg

SEQ ID NO: 35346 - DNA, 281 bp, Glycine max
tcgaacaacagaagctacgagaactacaatggtcattatatgtcacacggaagtccgattcaggtgcataatatatcgagacgctcgaaatacaacatcggaagctctcgagatattccaatggtcataacttgtctcacggatgtacgagtgacgtgcataatgtatcaagaagctggaaattgaacaacgaaagctctcgagaaactctgatggtcataacttgtcacacggacattcgacacacgcgcataatatatcgagacgctcgaaattgaaca

SEQ ID NO: 35347 - DNA, 424 bp, Glycine max
  unsure at all n locations
agcttatctagacacaatatatttcaccttanataattgttatctaaacttttttctacgtaatgcggaataagtaaaaaactcggtggattaacaacaaattattgctttgtgtttgaaattattaagatgtaacaatgtgatgaggaaactaaactcaacaaactttttgcttgtagggtctacctattatgcaaactttaaccctcaagtctcgaccatgaaataaacagtagaggtgacagaaaggttgggatggctnggatgcaaaaggtacccanatccanagaccnagctggcaacctatatggacacacgctgacaagcccaggactctnttttattccatatacatncgaaattgtttttttttttctctctctttgggtactaatgtattttgatgtgcatgttcagcatcaat

SEQ ID NO: 35348 - DNA, 488 bp, Glycine max
  unsure at all n locations
tctnacaaactctgctagtgaaattcacatcacatcactatacattttatcttggattttgcatcagacctgggagatgcagatgttgatgaagatgaatgtcttccagtgtttcttgccacctgaaaatagcatcaccagaaaattcttaaaatttcaactttcatataagcagagctagtagagtagtcaaacaccatatcattttcttagaaaagagtttataattttcatgcacttagtgtaaagagttttacattatcaacaaattaaaaatcactctaagaatgactttctaacaatcttatcatatatgacaacttgtgactgaatgatggtgtaaaattaaattggtagtatattatagttaaaattctataaanatgatcaggtatttgctacccaataatatagatcctccacaaaattganaatgatcacatccattggctgccactcaataagataccaaagcaactgacaacact

SEQ ID NO: 35349 - DNA, 398 bp, Glycine max
  unsure at all n locations
agctntggattatatatatcttagaaactttttcactcatgcactcactcagcgcgccctatgcgctaagcgtatcattgtgcacgtgctgagcgagtcattactcgcgctaaacgcaccatcccctactcattggttgatgaagcatcgctaagcgagccatgtgcgctaagcccataaacctcactggaatttcatcttttggaattgggctaagcgagacatctcgctaagtgccccagtgcgctaagcgcaataccctctctgttcgaaccttcatgtgaattgggcccaataagtcaacctgctaagcccaaatccctttccgggttggaattgtgctaagcgagcccatctcgctaagcgcgccccactactacatcatgaagcattaattc

SEQ ID NO: 35350 - DNA, 437 bp, Glycine max
ctttgtcgcgatgacgacatcctcttatacttgttctatgagatctatatgtacctgcaatgctctgttgttttcggcctgtacgaagctctatcttcttagtgatatttctcccacttataccgggaccataacatccatcccgtataccggccaaaaaggtgtctcttgggttggaaatcctggagtaaaccaatgtgcccataagatttcaaggagctcctcagcccatctttccaatggcattgtgtagccatttctttagttccaccaaaattacttggtcgttagtttaatggtgttctactagcggaactcgtgcttgatgtcgatgcttgatataaactcgatcatatttcagtctgggaattgtaacatatttcggtaccacaactcatggagcgccgagcgagtgatgatattctccaatgaacttt

SEQ ID NO: 35351 - DNA, 424 bp, Glycine max
  unsure at all n locations
agctttgggccttcaggccaaaccaacgaacccactctgggtcttggtcgacaatggccaccaaattgagtgcaaccacatgcgtgcagtagttccagtggatgtccaggtgcagatattttccattgacctccatgttttttccctttgtggtgcaaacttagttcttggagttcagtggctaaaatcattgggactactccttacaaactacaatgatctaacaatgaaattcatatgtgttggccttgtggtggatctgaagggggacatggttctgaagtgcggtccattacgccaccacaactatgacgtttggtccataaggatggagctagtggnttcttccatattcgcatggtatcatgcgagcccccttcaacctanaccatttgttcacccactaacactctagaaatagcat

SEQ ID NO: 35352 - DNA, 405 bp, Glycine max
  unsure at all n locations
agctttgaggaaattcaaacgacaataacttttgactcggatgtccgattgtgtcccgtagtatctcgagacgctccaaattcaaaacagaagctattagaaaaatctatggacgataactttttacacggatgtcccattgagtcccataatatatcgagacgctcgtaattgaaaacagaagcgctgaccaaattcaaacgacaataacttttgactcagatatccgattgtgtcccgtaatatatcgagacgctcgaaattcagaacaaagctattagaaaaatcaaacgacgataactttntacacggatgtccgattgagtcccataatatgtcgagacgtttgatattgaaaactgaagctctgagaataatcaaacgaccataacttttaactcggat

SEQ ID NO: 35353 - DNA, 470 bp, Glycine max
  unsure at all n locations
ttacgagcgtctcganatcctacgggactctattggtcatccgagtgaaaagttattgtcggttgaatttgtttagagcttatgttttcaattacgagcgttttgatatcccacgggacacaatcggaaatccgagttaaaagttattgtcgttagaattttctcatagcttccgttttcaattacgagcgtctcgatatcctacgggacacaatcgaacatccgagtcaaaagttattgtcgtttgaatttgctcagagcttcagttttcaattacgagcgtgtggatatattacaagactcaatcagacatccgagttaaaagttattgtcgtttggactttaatagagcttctgttttcaattagagcgtctccatatattacgagactatattagacatccgagtcaatagtatggtcgtttactttcacagagcttgcgtgttaatttgagcggccgatatatat

SEQ ID NO: 35354 - DNA, 424 bp, Glycine max
agcttctgttttcaattacgagcgtctccatatattacgggcctcaatccgacatcggagtaaaaagttattgtcgttagaatttgctcagagcttctgttctgaattttgagagtctcgatatactacggaacacaatcggacatctcagtaaaaagatattgtcgtttgaatttgctcagagcttctgttcttaattacgagagtctcgatatattacgggattcattcggacattcaagtaaaaagttattgccgcttgaatttgctcaaagcattcgttgtcaattacgagcgtctagatatattacgggattcattcggacatccgagtaaaaagttattgtctttttatcttgctcagagcttctgttttcaatttcgagcatcttgatatattacatgactcaatcggacatccgag

SEQ ID NO: 35355 - DNA, 469 bp, Glycine max
  unsure at all n locations
tgtagaaaatcganacgacaaannattttatctaagatttccgaataaattccgtagtatatcgagacgctcgaaattcaaaataaacctctcagcaaaatgaaacgacaataactttttactcgaatgtccgaatgaatcccgtaatatatcgagacgctcgtaactganaacagaagctctgagcaaattcaaaagataataactttttactcgtacgtccgattgtttcctgtagtatatcgagaccctcgtaattgaaaccagaagcccgtagcaaactcaaacggcaataaatttttactcggatgcccgaatgaatcccataatatatcgaggcgatcgtaattganaacagaagctatgagcaaattcaaacgacaataactntntactcggatgaataccgtaatatatcgagacgctcgtaattganaacaaaagctctgagcacattcaaacgacaata

SEQ ID NO: 35356 - DNA, 413 bp, Glycine max
agcttcacggatttgcttacggaataatctcggaagcgttacggaagcacctcgacttggattttcttcacggaaacaattgttttcacccaaaacagcagttgaagaccgaagaaaacgaataacgaacgatgaatgtcgaacaacgattgaaaatcttcgcgtaattacccacggaaacgttacggaagtgcctcggcttggattttcttcacggaaacaatctttctcatcaatttcaagagaatacgaagtaccaagaaggctgaaccctctccttcttcattcctccgcctatttatagcaaaataggggaggagcttgcacccagccacccaggcgagctcactcgcccggcgagctaattgttccttcgaacaaccgcttctgaggaagatatgaaggccgagtgg

SEQ ID NO: 35357 - DNA, 436 bp, Glycine max
  unsure at all n locations
gcttccatccttactctnttttttttntttgttntggattatgttcaatatcttttatacttggtatcaagtattggattgcgtactttcatacgatgaatctaagagaggtgtcctttaagagacatcgatacatggtatctgctttatttttctctttgcagattgttagttacatgcatgttgcggttcatattttacacagaatatttcttcttttacaacttgtgagtgtcatccattttatcacctggtggaataagtactggactccacatgaagaaaggaagcagaggtacacattatttctgcaataattcatagataaacctgaagtcaaattttacatcttgttctgaggatgaagggaacatacttgacttctgaatcagaattgtgtacacggtatttggtgtttgataaatagactaaagac

SEQ ID NO: 35358 - DNA, 412 bp, Glycine max
agcttatataggaagcttcaaaggagaaacaaaatgagagagaggggaaaaaagtgacatgggaatgaaggaaagatggggaaagaagttgaactttgactcgtatgcaatatcatacttcgagagttcaattgaccatgtcatcatttgtctgactaactcaggcttgcgtaatatcttgcctattgggcaatcagtttgaacagtgatcttgtggctctgaaagtattgtcgaaggtagcaagcggcgttgaccagtgtgagggctaccttttccatcacctgttacctcgtctctagatcttacagctcccgacttacaaagtatatcgacctctgctatcttccttcctcttgtatcaataccacgcttatggcctcgatcgagatcgacaggtaaacaatcaatctt

SEQ ID NO: 35359 - DNA, 403 bp, Glycine max
  unsure at all n locations
tataagtgaggcctngtgagaggatttgtccaaaccctcctatatcagtacttgtagtaataaagctgacactactactactaaggcaaggataagatgcagcatcgaccaaagctntctgaagaacaaatctgttaagggtaccacggaacttcttgaacagcatgtgtggaggccccagagagggttgccagagcgtgcagtggcaattcttaaagcctggttatttgagcattttcttcatccgtatgttagtctctatctatgtctcttattaatatatttcttgcttcgtgactctcttttctgcattctaaagagacatttggattgaattgtgtgctttttttgctgatgttgaatatctctttcattaccctacagacactgattaacacatgct

SEQ ID NO: 35360 - DNA, 405 bp, Glycine max
  unsure at all n locations
cgctngtaatcgattaccgcgagctgtaatcgctacaataagctccctgtctataaaagctgcatttctcttccttgcgcaaaaccctttcttcctctttctccttgatgacgcccaaccctctccaaacttcagatcttcataactctctcatttattatccaaatcacttcaaacaaagctcagatttcttctttttcaattctctacaaagcccgccgatcaaaatttgctgaaacaagctacaatggcagaatcctcaaagaagagaaagggatcctcctccaccaccaccactgcaggccaacgccgccacggcacatccgatgacccaccaacatcaaatcctccttccttttcatctcccacgtcattaactgttgcttctttcaatgaccagcgcta

SEQ ID NO: 35361 - DNA, 389 bp, Glycine max
  unsure at all n locations
tcaataaaattacttgcccacattatgcaattcctacaattgttagtcagattctttgtgatatggaaatactatcataatttgcaattgtcattaacactggtttggaaagaataccgcgcttttcaatttgtcatttgattgtcttttctttggaattatgttacatacatagcagttttgcttctaatgtttgatctaacaacttagtcatgtcataacttttgttntgaaatattattcctcattgtgggtttgcatacactactaaatactggacattctatgtcggttatttaggacattctaaatcggntattaaccattgtcatagacaacgccgtanaatattcgcatctacgatgatggttaccattttagaatgtaat

SEQ ID NO: 35362 - DNA, 417 bp, Glycine max
  unsure at all n locations
agctntgcatgtcaagctttgcacaagacctatgggaagatttgggatctagctatgatagatgtttctattgaagccattgcagccctcactcagtattacgatcagccactaagatgctttatgtttggggactttcagttagtaccaaccgtggaggagtttgaagagatcttgggatgcctgctacgaggaagaaaaccatatcttttttctgggttctatccttccatggcgagaatagccaaggtagtcaaaatctcggtgcaagaattggaccgagtaaagcataatagatatggcgtggtcggaataccgaggaagcacttggaggagaaagcgaaggctctggcggatcgaggtgaatgggcttcgctcattgatgtcttggcactattggtatttggagtcgtcctc

SEQ ID NO: 35363 - DNA, 432 bp, Glycine max
  unsure at all n locations
taacaaggtgtgttntatgcttgagaagccttggtctatatgctgtcaaccatagtcaaccaatcaaagtaattaagataaaactattttgagcattgataatattagtttatctgtaattaagaattatcatgcttttagttcaaggaaaattctaatatgcattaagaattaatttattgagcataattagtgttgtattcatagaagattcatttacaactagatttgagtgattccaaaggcattgaactcatacaattatttgtgacaatatggtttatttactggagtcaaaataattaaaataggatggttagatatgccaacgaacatttttaagaatcatatgttaggaatgactaaagagtccttataccttattttggagtcttcatacaaactaagagagactcctcaccctangagctg

SEQ ID NO: 35364 - DNA, 427 bp, Glycine max
  unsure at all n locations
agcttatgctacaaacatctacaacagacctcctcaacctcagcagcaaaatcagccacaacagaacaattatgacctctccagcaacaggtacaatcccgggtggaggaataatcccaaccttagatggtcgaatccttcacaacaacagcaacaacaacaaccttattttcaaaatgttgctagcccaagcacaccatacgttcctccaccaatccagcatcaacagcagcaacagccccagaaacaacaaatagttgaggctcctccgcaaccttcccttgaagaacttgtgaggaaaatgactatgctaaacatgcagtttcaacaagagaccagagcctncattcagagcttaactaatcagatgggacaattggctacacagttaaatcaacaacagtcccagaattctgacagattacct

SEQ ID NO: 35365 - DNA, 488 bp, Glycine max
  unsure at all n locations
cgtcgtatggganaatcagaacaacttactgaagggaaaactatgttcataatgtgtacagaggaataaaaaggggtctatttgcatataaattatattaaaattgataagactttaaacatgtacctattaatcagctcttgaatttcaaaaaattcttcaatagtgtgaagattctatgtgtgtccacaccgagactaacctctattatcaactactttgatgagcagaatagaaaaaatttagaaaacaaaccttaaaatattttggtgcttgtgtactgagtgaagaggaagaaaaaatgataagtgtttntcaacgtgcaaagaatataataatattctacttataaaattaatgaattatttgatcaaattaaattctctaatttaatcatcanatattaaaatagtttctttaatagacattagagcattcgttggtatatgaccccatangttcaatactaagccaataatatattaatc

SEQ ID NO: 35366 - DNA, 426 bp, Glycine max
  unsure at all n locations
agctnttgatggatctttgcttctgaacactctttctcagggtttatttttcgtgggttattgattaataattaaaaacctgatccaagtgctcctctataacattgctacatgagtaactcgttgtttgattataatatataaccttaaatgtccttgaaaggagttggactaatggattgttttattgacctgtggaaaatatggcatcgctgttcatatagntttgtgaaaacacttcttaatttccatggcaacacgaaataagtcattttattcacgttctgctactagatgttaacttaagaataaatataaataatactatcaccagtattttaattacaatattatcatattgtaattaacatattggtcttcatattataaatactgatctattgattattagtaatattgataata

SEQ ID NO: 35367 - DNA, 460 bp, Glycine max
  unsure at all n locations
ctcacaagatctgtgttgccttgcttctgaaggaaaggccgtgcataatcagagggaaaagatagaggcacaagagcatcaaagtgctcaaattaattcagagtatgcagatgcaaaaaggcttaactgcagttcactagtaatagatttgcagtttacatccccacctatacctgtcgatattcctgagagaaatagaagtcaaaataaggaagaactggttttattagcttcaaatctggagtcacatgtttcccaagaaggacatgttgggagtattactgatcatagcttgttggtaagtactaaagctgagggtggtactgtcatggtaaataaaacatggttgaagaatagcatggcgaaagcaacacgagtgcatctcaatactaaacctgctgttggagtgcctctcaatagcatggggaaagcagcaagagtgcatcttantactaaactt

SEQ ID NO: 35368 - DNA, 429 bp, Glycine max
agctctacatatttgttttaatatctatatcggcataactgcactgttaaaggtcaatcagtagatgcacattatgttgattcaaccagtatgtgttcttgccatgataatgtgccgcttatgaagatttgtcgccggcccgaaaccgattatcggttacagcaacttcatgctgtgaatgaggcagcacctgtggatcagcagaagactggcatggatccagcatcaaatgttaatgccgtgagggctactactactgaaacagtgccaaagcagctgattgcagcaaacattcatatggagacgacgccagttccagttgtgcaaacaaatgttcctcaacaacctccacaaagtatggatattgatgtggatcataagaaagctgacacaattgctgatgttcaagctggaaattccatcatcacc

SEQ ID NO: 35369 - DNA, 438 bp, Glycine max
  unsure at all n locations
ttgagccgagatnctgactcactgtataccttgagccagagtgttattgttgatccttaccctcggaagcaaatgagaatagaggggagatttccaatccnagaataagagaaggagaatttgcactgaatgcagatcaagaaaagaaggagaattccccaatcaaagagtgcgataaagcaacaaaagataagaaggaaaattccccaatcaaagagtgggagaaagcaaaaagaagagaaaggaaaattctcaatcaaagaatgggagatagtaaaaaaggaagaagaagaaggaaagaaagctcctgatcaaggatcgaaagaaaacagaagatatgtgcagagaggtctttggaccggacaatatctgaacaatacagaattgcaccaaatgaacgaaaanagaaggagagggaaccacgacctaaaatagtct

SEQ ID NO: 35370 - DNA, 422 bp, Glycine max
agcttgtctcatcgtttatgcgagacagagaccaacatgttagccatcgtcagcaagtaccaagaagaattaaatctagccacaacccacgagcataaagtggcggacgagtatgcccgagtgtacgcggaaaagaaggctagaggaagggtgatcgactcgttacatcaagaggcaacaatgtggatggaccaatttgctcctaccttgaacgggagtcaagaacttccttgattgctagctaaggccaaagcaatggcggacacctatttcgtccccgaggagatccacggacttctcatctattgtcagcatatgatagacttaatggcccatataattagaaaccgctaggaagtttgactggcactcagatcttgactagttataaatttttaaataaaatgagtttatcccatgtt

SEQ ID NO: 35371 - DNA, 489 bp, Glycine max
  unsure at all n locations
nggttcccaacgctttgttcanactctcccanaacctagaggttttatagaatctctatcagacactatgctagatggcacaccatgtaatctgacagtctcactaatgtacagggaggtcaacttctctaaggaaaacctaatattgatggggataaagtgtgtagatttggtcaatctgtcaacaacaacccaaatagaatcaaaacctttgggggtcctaggtagtcctacaacaaaatccatggggatactatcccacctccactgnggtatctctaatggttgtaacttacctgaaggtctctgatgttctatcttagccttctggcagactaaacacgtatacacaaactcgttaacctctctcttcatgttgggccaccanaacattatctttagatccggattcatcttggtagcaccaaggtggatgctcanngtgctcctatgaccttcctctaagatcatcttcctatgttcggcaca

SEQ ID NO: 35372 - DNA, 407 bp, Glycine max
agcttagactgagttcatcctaccatcctcagactaatggccaaactgaacggaccattcattcgttggaggaccttttaagagcatgtgtcttagagcagaagggaagttgggagagttttcttccattgatagagttcacttataataacagttttcactctaccattagcatggctccctatgaagctttgtatgatagatgatgtacgacacccctatgttggttagagcccggagaaggcctcaccttatgaccagacgtggtacaacaaaccactgagaaagtttagttaattcaggaaaggatgagaactgctcacagtacgtagaatagttatcatgataagaggaggaaagaattggaattcgacgttagcgatcatgtattcttgagagtcactctg

SEQ ID NO: 35373 - DNA, 496 bp, Glycine max
  unsure at all n locations
cctgaagacacagtaatggcaaggatgctnttgttctcttgaatctctttngggtcaatgccaattaagtccaatgaggcaaagtaaaaattgttgtttcaaaaagaataaagggtgggaaatgcaaaacaactttgtcacctcaggagaagctttacatgatgaataaaaagagaaaggaaagacattcttgccttataggaaaaagttgattgggatctacgtcaacattaatggatttagtaggatccttagtactttttgatatcccaattctacattntttcactagttttggattgttttatttgctcatgataaaacaatttttttggtaaataatccatgtacaaaatttggtgtttacaacaatatcattgtttgaggattttnttttgctttagaagaaaacaagagttngcaattccctaggagataaatattttgtgtaatttttagttatatcatatctacttacaaaccctanatatctact

SEQ ID NO: 35374 - DNA, 361 bp, Glycine max
agcttgtatcttaatttagaattcctctataataaaggtgattacatcaatccttttcattttttggtggtaaagacggctttatcccatcaatcctttttctatatctatcataataatgatccgggctcctttgaatattttacaggaaagaatctatctcacctgtaatccgatatcgcaatcccgcgatgtgaccgttttatttcatataaattaattccttcttttatatgcgcacatacaagagatgggttagccgtttttttcttgcacaaaagtaaattaaaccattatcaccagtttagcggctgtcgccaccttcttctacctctaccatatcccatcactgccacaatgc

SEQ ID NO: 35375 - DNA, 303 bp, Glycine max
  unsure at all n locations
aaataactgtcataaggcgtgaacctatgcatactacccatcatatctctcanaacactatacccacgaaccattatgtgagatgatgtctacccaaacctgatatgtgaagtgccacgatggagagatgcgctacacgactccgaacatggctttctttcgcgattgggagcagacatggtgtacaaaggttggagctctgatggagcttcaatggcgatgaagaagaaaggaatagcaacgtgagaaagagagggagaatagcttctgaattcttggggctgagtgaggagagagagaacg

SEQ ID NO: 35376 - DNA, 426 bp, Glycine max
agcttatgcgcatatttccttacgaacgttcacttgcacaagacatcctattaactaagaaaaatgcacccatatacaatcaaggtagcttcattacctagattatttacatgtacttccaaggtgtatttgttacttacatcacacacatctccttggctgaatttacatacatgcatactcaaagcattttggggtaccaaaaattgcacatgcgctcatcttggtatttctaatacctatacatatacaaacttcatgatgaatcttgactacctacacaataaggtgctacatttcatgcttttttttcaagtttttgctacctaaagccgcatgcaaattcaagcatattttccttcactgactaaaattgtattcaaaataaaaggtatatatctctttgtaatatgctttcttcacata

SEQ ID NO: 35377 - DNA, 411 bp, Glycine max
  unsure at all n locations
tgtcatcgattaccagaggacattntcagaaaattatttctatgagtcacaacttttcaaatggctcttacatggccatcaaaggtctatttatatgtgacttggaacacanatttgctcacaatttttcagaacaaaaaggttttatcctctcaaaaagcaaaatcttcttatcctcttaagattccttggccaatacacttgcaattcaataaggatttatttgagtgctcaaattgttcaatctatctctttcaagagagatttcttcttctcttcactctaattctcanaaagggattaagagaccgagggtctcttgttgtatagaaatctgaacacanaggaaggattgtccttgtgtggttcagaacttgtatagggatttacaagatagtggaactctcaagc

SEQ ID NO: 35378 - DNA, 402 bp, Glycine max
  unsure at all n locations
agcttctatattagctgaaccattatatcaataaacacaagttgagttttattcagaanattagagcttatctcttttatcttagtgagagtgattctcctaaattcttgagtgattcaagaacaccttggctgtatcaaaggactttcacaacctttgtgtgttgccctcgctggaaagagtgattctttccttcctttcatcatcacccttgttctttcaacccacaattccaaaaaatccacctctgcccagaattatctcgtggccataacttccattttacgcactcaaattaagtgattcttgagcctaaattgaatttcaatacgagacctttcaactcgttctggaatcacctcatttggagcccttgtagcttccagtattggcatatctata

SEQ ID NO: 35379 - DNA, 342 bp, Glycine max
  unsure at all n locations
gtggttntcaattacgagtgtcgcgatatcctacgggactcttttgacatccgaatcanaagttattacgtttgacttttcctagagctcccgttttcaatttctagcgtctcgatatattaaggggctcaatcggacatccgagttaaaagttattgttgtttgacttttcttagagcttccgttttcaattttgagcgtctcgatatattacagggctcgattagacatccgagttaaaagttattgtcgttagatttttctcagagcttccgttttcaattacgagcgtctcgatattctacgggactcagtcggacatccgagtcaaaagttattgtc

SEQ ID NO: 35380 - DNA, 392 bp, Glycine max
agcttcatcctcagatccctcttgttggactaggcttaatttagacagccctcataggtttagactaacttaaactaagcttcgtccgcagatccctcatttaagtctaggctcagcttacatagcttacgaaagtttagactaatttaacttaagcttcgttcgtagatcccttatttaagactaggcttagatcaaacaacattattgtaacaacatatttgaaatcaaaacttaatccgcagatccctcatttaagactaagtttcaatcctgcttcaatcatgttctaaggtagcagtacatttcccaatgctaaagtcacctaactatgcacacaaatgggtgatcagaccaagagcatatagaatttaagcactcgaagaagcatt

SEQ ID NO: 35381 - DNA, 368 bp, Glycine max
  unsure at all n locations
tgtccatgaaaataagatattgaagtatgtcatttcaatttctgactacgtgaactggatcatttttaagatccaacgccttaaaatgatcacctcttatgttaaagataaaaatcacttgataagcaagaactacgtaggtctgatttcctcatcacaattgatgatacgtaggagcataaggcccgcttttgttgaccaccccgagagatcgttaatggtccaacgccttaacgtttctctcctttctgaatcaaaagatcgtttaatggtccaacaccttanatgacctttttgttcaatcagaatatatcgttgccaaagatgaataaacaacttaaccaaacactcttgtccgaaagaactac

SEQ ID NO: 35382 - DNA, 422 bp, Glycine max
  unsure at all n locations
agcttccatcatgagatatgatgtagaaccactccatgtagtccaatacacactgtccaggagcaatacaaatctgacccaccggtgcaaggtatttagaaaactaaatctatctatcatcaatatcctctatagataaagatggagcaacaaggtgtggaggaatggtctgcacataaccaaattgtcacaaccctctttagcagtgtcgtctcgaacatcttcggngcccgaagcaaaaactaaaaaagggacccctaaacaacggaaacgtatttcataaataattcattgacaaaaaatttcatgaatttataaattcaaccaacaaaaaataaacacaaaactcttgtatattataaagttcaccacaataaagttaataattcttttccagatttctaaaagttggtaagcccctc

SEQ ID NO: 35383 - DNA, 478 bp, Glycine max
  unsure at all n locations
tacaacgtagagctaatacagttgtcaactcagaattgactctctaccaggagcaaacaagtacatatactattgttatcaccaagtccaagtagtagaccaacaaattgaaaattaaaatgttatttggctaaggagtaatagaccaatagaattggttaaatacatttagaatgactatgttattcggtaattcctaataaaaaagttaaagaatgaaagcaataaaccaagttcaacacttgaactaaaatggtactaattcattgataaaaatggtaccttatttgataggtcaggtctaagcctttacaaaataaatgaaaaaaaaaacaaaattaaacttgagttaactcggttggcacctcctcaataggtatttaagcttcattaaccaattccccttgatgatcaacgtctttgtcaacatcaaagaaggaaatatcaacatctttcanaaataacttaacttgataga

SEQ ID NO: 35384 - DNA, 325 bp, Glycine max
  unsure at all n locations
agctctccaccatacccaacaatgtcattactcagccaataaacaaacctcctccttacccaccacccagttattcacaaaggccatccctaaatcaaccacaaagtctgtctaccgcacttccaatgacgaagaccacctttagcacaaaccacttgtaaaaatatcaacattgaaaaatataacctcccacaaaaaggaattntgcagcaaaaagcctgtagggttcaccccaaattccgttgtcatatgctaaacttgatcccatatctacttgataattcaaatggtagccataaccctagccaaggttcatcaacctcca

SEQ ID NO: 35385 - DNA, 390 bp, Glycine max
  unsure at all n locations
ntataagcgcgggttcgggagacanaggtcaagcgttcgcgatatgcgaagatgatattccgagtactttggatttggtacgaccatgccctcctgatttccagctgggaaattggcgagtggaggaacgccccggcatttacgcaacaagcataatgtaaacctttacggttntaaaagctctatagttgggcctaggctttagagattttccttttgtaaggctttgtgtcttttgttcttgaatttataatacaaggatctttcttcatctgttcctggtctctacccattctcattcatttgcatgtttacttctttttctgaaacggcagatccgatgacgagttccccgaaggtactaatacctgtgacccgtctatcgacttc

SEQ ID NO: 35386 - DNA, 419 bp, Glycine max
agcttctcatagaagcttctcaaggaagtttctcaagaaagcttctcatggaagcttctcaaggaagtttctcaaggaagctacctaggctataaatagaagcatgtgtaacactttttgtaactttgatgaatgaaagtcttatgagacacacttcaaagttccacttctctccctctcttattccttcaatttcgtgctccccccttctctctttcttatcctccattaaagcatcctcttcaagattcttatccaaggcacattcttggtggagaagctccttcttccatggcttatttcctagtggatgaggactcccctctcttcttctcctttgccttccgctgcatctccatggtggaaaatcaccattgaagaaccgcattgaagctcacagatccagcctccatagaagc

SEQ ID NO: 35387 - DNA, 318 bp, Glycine max
cgaagtgagagagtgtggaagagtcagtcttcctacttttattcgttgaccacagagtggtacctgaagatatgtctcgagggtcaagagaccttggggacgtcaggtggtgtgttattgcccaaaaccaagcttgaccaatcccgacccaacccaggcatagtcagtcagtgagaacctgtgacgtacctagacaggcgagctcctggcagtcaaccgataaaagaacacagaccacaaagcaaggaggcttgtgtggtggcatggcagctatggatcttgagtgatatttgggttatggcctctggtaatcgatta

SEQ ID NO: 35388 - DNA, 415 bp, Glycine max
  unsure at all n locations
agctcttggcacaaagaagaataagaagttcacagagattcaaggcttgtaaaggactgtataagattgattggaaaagtgtattaaaaagcaaatcaaagccttgcttttatagactcttcatgtctggccaagaggatcatttagaagagttataacttttagaaaaacttaaaaccaatttgaaaaagtcaaaaaaccatttgaagagttacatcttttgatttattcagaaacaatcactggtaatcgattaccaaatcagtgtaatcgattacacaaaacttttatgtgaaaggatgcgactcttcacatttgaatttgaagttcaacgtttaaaggcactgataatcgattaccanaacattgtaatcgattacaactttttgaaatcaatgggagcgttgaaattcat

SEQ ID NO: 35389 - DNA, 484 bp, Glycine max
  unsure at all n locations
ntcggacaatgaagaagaagaagttcaaagagattcaaggcttgtctatgattgattgaataagtgtaaaaatgtatttaaaagcaaatcaaagtcttgcatttatagactcttaatgtctggccaagaggaccatttagaagagttataacttttagaaaaacttaaaaccaatttgaaaaagtcaaaaaccttttgaagagttacatcttttgatttattcagaaacaatcactggtaatcgattaccaaatcagtgtaatggattacacaaggcttttatgtgaaaggatgtgactcttcacatttgaatttgaatttcaacgttcaaaggcactggtaatcgattaccacaacattgtaatcgattacagctttttgaaattaattggaacgttgtagattcaatatgaaaactttttcagaacaattctgctattggtcatcgattacaacaatttggtaatcaattaccagagagtaa

SEQ ID NO: 35390 - DNA, 430 bp, Glycine max
  unsure at all n locations
agcttatgcgcatatttccttacgaacgttcacttgcacaagacatcctatcaactaagaaaaatgcacccatatacaatcaaggtagcttcattacctaaattatttacatgtacttccaaggtgtatttgttatttacatcacacacacctccttggctgaatttacatacatacatactcaaagcattttggggtaccaaaaactgcacatgcgctcatcttggtatttctaatacccatacatatacaaacttcacgatgaatcttgactacctacacaataaggtgctacatttcatgctntnttnttttttcaagtttttgctacctaaagccacatgcaaattcaagcatattttcctttgctgactaaaattgtattcaaattagaaggtatatattnttttgtaatatgttttcttcacat

SEQ ID NO: 35391 - DNA, 405 bp, Glycine max
cgcatcatcccgtttcagattctatacaacgattaatacagattgtttgcattaatcggtgtattgaatcttgaattgtccgtttggacagtttgggaagactaatttttaatagtagattattatgtataggttaattctcttttcttaaatttgtcaacatttcggtatagttcatttccctttgttcttcgagttcatagttgaatatggtggataatgatatgccaccactttcatgttgtgtacttggggacttagccgaaatgttgccgaaattttgacaaatatagaaaagacaattaacttgtagcattcaatctactaataaaaaatttcttcttgaatgggttatggccacacctttaattaacaaagtgagggttacatgcacgtatataactc

SEQ ID NO: 35392 - DNA, 360 bp, Glycine max
agcttcaggctgctcaattgctccaggatgctgcatggaagggcaaaggtctgtatggtggtcagcagaggagcacaaaccacaaacccttgcgacaggtacagatttctgattcaaggccagctgggttaccaagttgaccaacgcatccagtttgccttcaagcttcttagtttcagatgatgcagatgggtttgtagctacctcatgcactcctctaatgactatggcatcatttctggcgctaaactgctgggagttggaggccatcttctcaattaaatatctggcttcagcatgagacatggcttcaagggctacatcactggcagcatctatcatacttctctgcatattact

SEQ ID NO: 35393 - DNA, 303 bp, Glycine max
cgaacgccggccatcgtcgtgaccacggtgggtgcactgacaatcgtgttgtcgctgaatccctgtacttgcatgtggagctctggtcccaccgtcgaggtggtgctatatggattctgcaactcggcgtttggctctgccaccatgacctccacctcctcaccagtcatccacgcattgctggtaatcccgtttagcgtaccgacgtcactatctgcagagtctaattctttacatgagccatactcactttccttccggccatagcaagggcctgaattgctgccatcttctattacaata

SEQ ID NO: 35394 - DNA, 427 bp, Glycine max
agcttcaatcacattgtgtgctgctctgacctctacgtctgctatgtattcctacaataaacaaaagacagtgtcatttttagacaaaattctgagattcaatgaacaagtaataaatcttcgcacaagtacgttttggtcaaactttcataaaataacattattaggatggacctaattaaagtaaccatgctataacttttcttcaccaaatctttgcttttgctcagaaagtcgggtctaacattgcatggaaaatggaaaattcgttcctggtgtttgtgatacatatatagatgagattaatttactaaaagcctaatatatatcaatatcactagcgaattaatatacatttcagtggacaatatgtattggaattatgttgtaatacctttcgtctaatatatgttaacaaataaactat

SEQ ID NO: 35395 - DNA, 445 bp, Glycine max
  unsure at all n locations
ntgagccacaatcctgactcaccatatacctttgacccaggtgttaatgccaatccttaccctcggaagcaaaanaagaatagaggggaaatttccaatcaaagaataagagaaggaaaattttcaatgaaagcaaaaaagaaatgaaggaaaattccccaatcaaagagtgggagatagcaaaaaaaggaaaagaaggagaattccccaatcaaagagtgggagaaagcaaaaagaaaagaaaggaaaattcccaatcaaagaatgggagatagtaaaaaaggaagaagaagaaggaaagaaagctcctgatcaaggatcgaaagaaaccagaagaaatgtgcagagaggtctttggaccagacaatatctgaacagtacagaattgtcaccaaatgaacgaaaaaagaatgaaagggaaccacgacctcaaatagtcttctcc

SEQ ID NO: 35396 - DNA, 512 bp, Glycine max
  unsure at all n locations
tcgcgctctacctacctctcttcccactaatataggagtactactatgtacacactattattgtaatacaaaacanncatacagcngnngcctgatgcatcatactcacggcaacagccggaccgggaccttagatcgactgcagcagcaagctagaaaatttatttccgctgttatactctgtaaagagttgttattgtgcgacttattttcccattcataaagctaatagaacaccctaaactgctctaggccataatttaaaagactgtactgctaagtgattcatcctgaatacgaaaactcaagtggttgaaatgacaaatgacaccatgcaattaattgacctgaaatttcaattattcataatgcaacaaagaaaactacccgacatcctcttagcgaaaaggcactacccacttttgggtgaccataaaatatcatactgtggcctattcgtaactaccattaaaatacattttaaacccactgtcttatccatcaatcatacg

SEQ ID NO: 35397 - DNA, 421 bp, Glycine max
  unsure at all n locations
agcttaattgactgacactcattgggtttaacagcagcagtaatgaatttctcattgggtttaacaacatcagtaattttgggcttaattgagtgacactcattgggtttaacagcagcaaaaaagatgaagcaaatgtaccttctgttgtactttatcaggatgagtgcacaatgtagctttcctataaacttttctaacagcagcaacagtaatcaaatcattctaacaaactgactgccaactacattcaggccacagcacctgataatcattcatgaaggaaacatgttaacacaacaaacatatcagttttgcaatgagcagtgtatatcanaccaatcatatcagtgcatatgaggccttatccaggctatgtgaggccttatgcacgctagacaanntttttaagttttaattt

SEQ ID NO: 35398 - DNA, 407 bp, Glycine max
  unsure at all n locations
gtacaattactatagattctanaaattatgttaatgcgaatgcttagtggcataagggattaatgtcctaatttaaattcttaccttctccatagctgttganttgattaanaaaaatacattttgcccacaaaatgaataattatgcaactaaataaagttgataaaaaataaaataaatntgagttaagcaagttgttgatgaaaaattaaaatataaagtttgaattaaatataataaagtaaatatgtaattatatattaatcatgctctttttntataattntacatagatattaaatggataggtattcaaattatgacattaagatcattcgtttattttggtagcttttaaaaaattatctttaaaataaaaattgaactaaaatgctattttttagtc

SEQ ID NO: 35399 - DNA, 417 bp, Glycine max
  unsure at all n locations
agcttgaatcttggtggngagatatcacccgccattggtgtcttgatcctatttgggacactgtcagagaagccaagttagaggtaccaataaaattggattattgggaagttcatggattgttctgttcttttttcctttgagtgtaaactgtatatagttatatgataattactgaactgacatacaataagaatgtgactaacttgttgttggcattcctgataattactgaattttgcattttgtgaaaccaatttttgcgtccttgagcagtggaaacccttcttttaatgttggttttcctttaactaatgttgatattntaacttggctctgctgtgtgaagttgataagaatgtagtgattgttaaaggatttcactaggttcggttcagtggcatgcacctaagtctc

SEQ ID NO: 35400 - DNA, 490 bp, Glycine max
  unsure at all n locations
ggctctanatntacattgatgtttgtatttatgggaggaggttatatgccattnttgctttaagagtagtatcccactggtaaaattaactttccaaatgtttgccttcgcaggaatggccccgaggaagcttgcctcatagaggtccaggaaggacaaggcggccgaaggaactagttccactccggagtacgacagtcaccgctttatgagcgctgtacaccagcagcgcttcgaagccatcaagggatggtcgtttctccgggagcgacgcgtccagctcaagacgttaaagaagcgctactatgaggcaacctagtaccttntaaatttctgcctgctatttgatcactntttatagtaggaacgcacctagtgctcatgatcctgngaatntaaataaaacaagcgcaagctcggaaggtagtcatacctcacanaatatatatatngtatgttaggtagaaagataccttatatatgcatgtat

SEQ ID NO: 35401 - DNA, 360 bp, Glycine max
agctttattgactgtgtgcaatcacacattttacatagagtgtcctcattgatatgtttctacagttggttttgcataacattttaattgtcaaaacatatgattcatggatatgatctaagcattctttctttctttacatttttaagccactggccaaacagctatccccaatgtatattatctttatcatttgcaagccctttgagcaaaacacttgatattttattgtgaccctaacctacgataaaatgttcctacacttgatacttcactatgcatgctcatatctttcgaagcatatttattttagacttatactagagatatttgtaatttttctgcactttgcttgaggac

SEQ ID NO: 35402 - DNA, 226 bp, Glycine max
  unsure at all n locations
agcttgtgtctttcttnccgccccatactagcaaatcgaacaccatccaactatagggaaatgtcaccatgctctttaaacctctccataataaatgccttcactacttacttcactaccatgggatcatcaacccatctcctttcttttacaataccttgaatattattactcctcctccatttcaccactttatggaaataacaagtgctgtcacctccttcct

SEQ ID NO: 35403 - DNA, 313 bp, Glycine max
taatatgcatacaacaattgacttactagctgattgaacttgttgatgaggtcataaagacctactaccatctgcattttgagttgatactactccatcctcagatagaggcgattagtcgatcggttagtgactctgacgcatagatattcttgagcttctaccacaagaccttctatgatgcttccttcaacacgagttgttgtatcttaagagcgaaggctaaccaaatcagactcaccatactcctttggacatagaccactccgtttgatttatagaagctggcaattcttcttctaactcctgaaca

SEQ ID NO: 35404 - DNA, 297 bp, Glycine max
  unsure at all n locations
agcttctaatgctctgtgctgcaattgcagcactgccacagttgctttctcttctactgatagagaataattgagagaagatgatttgatgtcatcaaaggaaggccatcctgaagttgtagaagaaaaaccagccttggggctttcactttcccactcagcaccagaaaccagagattcatgagattcctacattcaattntcattagtaacaaccaacaagaagtaaacatatatgggagttgggatttgctagcagacaatattactattccaattntcacaaatttgaagaaa

SEQ ID NO: 35405 - DNA, 475 bp, Glycine max
  unsure at all n locations
ctgattccaaatggaacttctcttccactgagtcctccagctttttctgaaatagagttttggcagcctcaagttctgatatagctacttccttgtcatgtaaaatggtagtgatgtattcctgttttttagcctcagaacgagcaagttcttctagtaattgatccctctctttctcaataatctcttgtctatgttgagcctccgaaagagctattttggttaccactaattcatcttctattcctataacatcatcttgatcaacaactacatctgtgagtttgtcatctgaatcattctgtcacacaaatagaataaatatagggtcactctccactatcaactttgtaatttgcacctacttaatataatatcattaatagatatgtgaaactcggtcacctttctgaaaccagatactcaanatggccagcctcaaaatcatgtatttcataaagaactagatataagt

SEQ ID NO: 35406 - DNA, 324 bp, Glycine max
tctatggaagctggatctttgtacttcaatgagatgcttctatggtgattttcaccatggagatgcaacggaaggcaaacgagaagaagagaggggaggctccatcccctatggaataagccaaggaagaaggagcttcaccaccaagaattgccttggataacaagctcgaagaggatgctttaatggaggaaaagaaagagagaaggggggagcacgaaattgaacgaatacaagagggagagaagtggaactttgaagagatactataagactttcattcatcacaggtacaacaagcgctactcatgcttttatttatag

SEQ ID NO: 35407 - DNA, 451 bp, Glycine max
  unsure at all n locations
ctacatggagctacatcaggaagggaagccatagcaatgatgacattangtaaagaattgataaacaatgttgacaagatcattgaggccgaagaagaaatggctaactccatgtgtgtaattgagttgaatagacaaagtacatttttcttggtggaacaattactaaatccaagacaatgatgtcttccagaaaaatttgctataaacatttcttaataatggtgtaattgtggtaaattataaaaattacacatgtcatgttcacatgcaattgcaacatgtaagtatgtccatgttgattacaaatagttaatcaatggcgtttacaagctcaattacgtgtccaacgtttacagcagactgatagagcatttttagttcattaatatcctattcttcttagcttattcgacctttctttgactcttattctctcagcttaattcaa

SEQ ID NO: 35408 - DNA, 361 bp, Glycine max
gctctcactaagctcttattgtataagtgctcaactaaactatatattcatgttcaaatactcaaagacacctttgataaccttaaaatgggaatcctcaattgaatttcaacatattatgaactatatcgtatgcccttacaattttattctaacaagcctctggccctttatgtgtatcttcatcccaactgcccataccttcataaatatatacaggatatagtacctatgcacccattgtttatttgcatttaaactagaaaaagtacaccttagtatttactactacgaattgaacagggaaaaataatacaaaattacttacatgacactcccttgatttgaatctatcacaccc

SEQ ID NO: 35409 - DNA, 394 bp, Glycine max
  unsure at all n locations
nggaaacganattacctcactgggctatcacggcatgatgctattactctcactactaaactagaatatgattcgagatagaaggtaatgatgtataanaccaaaacttactatctccaacttccttttgttgttttccttttatccggcgagaacaacactggctcttgaatgttgaccttgaacagtagcaggaccagcacacattttcaaagataaaaaanaaattatatatatatatattgaactgaagataccccaccaccatggtggcaagtcctacgtaaacatatttctgttgacaaagacaaaaaagggacctttccatatgttntcacttttatatatatatatatatatatatatatatatatatatatacaactaataaccg

SEQ ID NO: 35410 - DNA, 410 bp, Glycine max
agcttccccgattactgtcaaaggccaaagcaatggcggacgtgtactccgcccccgaggaaatccacgggctcctcagctattgtcagcatatgatagacttgatggtccatataattaggagtcgatagggagtttgtattgtcattcagatcttggctagttataaatttctgaataaaatgagtttaccccatgattttactccaaaaaatcagcgcgaatcaaatcactcccacactttatctctagcatgcattcattcttcactacgtactccttacatttggtctctttaggaaagacgccataactaaacgcgccccaagggatccctatcgcaccatatcctaatcaaggacgatgagtaacctacaggaagcgcaggaacatatgaaagtcgacatgtc

SEQ ID NO: 35411 - DNA, 479 bp, Glycine max
  unsure at all n locations
ctaataccatgttaatcaccaactcttctaacagcttaagctattatgtgggttttgtgaatgataatgaccttattacatctgcggacaagtgaaaagggaacaagacaaaagggataccgaatggttgtgtatgtgccgaatactagcactaggcttacaaagtttcacacaatgcttatttgcttccagtataagcacataaagctcctcctgagatatataagaagccatggcattcttttagaaaagtggcaagcaaaaaagagggaagcaatatgttgatttaaaagttaaaaaatcaaagcaacatggggatttagcatttttattttatgcttgattcacagagcatgaacaaggagaaaaaactaagcttcatacatgtttatgtcatagtataccacattcattagatatttccatccccaatgatgggcaggtgcaagctttnggccaagtagataccttaaagagca

SEQ ID NO: 35412 - DNA, 366 bp, Glycine max
  unsure at all n locations
agcttccatcaacacatttgcatgtaggaggaatagtgaattgtgaagatgacatttcaggacctcgcattcttgctctctctctctcccacgtaagattctcctctctctctttattttattntatcaaaatggttgggattaggtggaaaatcccattttcgtaggcccacatcgtgttttctaatgggagttgataatggtccctactaaaattgctattggtccttacaaaactttaaaatttgaggaaaaggccaatttaccctctattcagacactccacccctccttcccccttcttcttactatggcttatgttcttctcaaccccatgttaaatatacaatggaaatacaattctat

SEQ ID NO: 35413 - DNA, 487 bp, Glycine max
  unsure at all n locations
cggatggattcagtctaactagggatcgaggtttagtaatttatgctacatcttagaacacaaaagcatgattgattagagaaacatctttatatacatcagctggtttgttagataaactcaatacctttacctattgctatcaatcttacttgcattnttactgtttttagcctatacttagtttaattatgttctaaataatcaattatcaatgtttctttcaacaatgctntatttatgaatttaaccctgtctaatactagctccctgagtgtgatactcagattcaatcgttttaattntaaatacttgacgatccggcgcgctttccggcaaatcggatttcccttgaacatatttgtataaagaaaaagtggaccataaagtaactgcaggggaaatccaacattgccccagtaagacattcctggaagaaatgcatccattaattttcatctttcgcgcatgcttccattatcctact

SEQ ID NO: 35414 - DNA, 403 bp, Glycine max
  unsure at all n locations
agcttagagttgataagtattctagcttacaaacttcattggatactggaacagctaaaggcttaaccaagggaaaaagagtcatcttaccctcaacgtttgttgggagcccatgttatatggatcaactttactttgatggtatggcaatatgcagtcatgttgggtctccaaatctttttattactctaacctgtaatccaaattggcccgaaattcgtagattactttcacctttgaatctcanaccaacagacaggccagatattgtatcacgaattttcagattaataaatataaacacatgctgtcagacttaacaaagggtcaattactgtgaaaagtggttgcatgtaagttgaccatcatctttatacttaaatacaaatataagttggtcatt

SEQ ID NO: 35415 - DNA, 464 bp, Glycine max
  unsure at all n locations
tacatatctatcttaagtccaagcccatagacgatatanaataatatctggacaagataagatgggatgaaatataatctggacgaaataaaatctagatagaataaaatttgaataaaataaaatctagatagaataaaatctggataagataaaatttgataaaataaagttattattattattattattattattattattattattattattattattattagttagacaagccggcttgtcaagcttaacaaacttnttttatggtttgagcttggcctttatatctaataaggctgtttaaaaagcttgagcttgacctttatagtaaacaagccaagccgaaccgagccttacataggccgagttgaaagccctcgacnagctgttcagctcattaccactcctaattataagtcccatgagcaagcctagtcctatataaatctgacaaaatatat

SEQ ID NO: 35416 - DNA, 178 bp, Glycine max
agcttgagatgatgaagtgttgaatggtgaaacttcctgcttttattgctgaccacagagtggtacctggagatatgtcgcgggggtcatgagaccttggggacgtcatgtggcgtgctattgcccacaaccaagctagaccaatccctacccaacccgggcatagtcagtcagtgag

SEQ ID NO: 35417 - DNA, 290 bp, Glycine max
tctcatgtagcaccacaaacctcattcttctgattactaagacaacttgatttcttcactttcttggcgtgcaaggcataacattgagctcgcctctctctttgatctttgactctatgatgaagcttcttcacataatcctggctgagcttgaccttatgtacgcgttcatgatagaaacattacgcatagcctttagatcacgacgagcctacggtgtctgtccataacctgcattagactgataactattaggttggctctgaacaccattatagagccaaccacca

SEQ ID NO: 35418 - DNA, 152 bp, Glycine max
agcttatcgcgcgcaatagtttctgctccttcgtgcttaacgccacgcttggcatctgcatttgcgtgctcgcttagcgtctgacgcgcgcttatcgccacttgtgggctgggcctgcttcacatttccttccttctcttcatttctattgc

SEQ ID NO: 35419 - DNA, 414 bp, Glycine max
agctttcttgagaaaacttccttgagaagcttctttgagaaaacttccttgagaagctagagcttagctacacacacccctctaataactaagctcacctccttgagaagcttccttgagaagattcctaaagaagctagagcttagctacacatacctctctaatagctaagcttacctcattgagatgagaagctagagcttagctacacacccctataatagctaagctcaccccatgacaaaaaaacatgaaaatacaaaaaaaagtccttactacaaagactactcaatagaatggccaaaatacaaggcccagatgaaggaaaaaccaattctaatatttacaaagataattgggctcatacttagcccatgggctcgaaatataccctaaggctcatgagaaccctc

SEQ ID NO: 35420 - DNA, 478 bp, Glycine max
  unsure at all n locations
gggagaggatgcttcaatggagganaagaaagagggagagaaatatggaggngggagcacgaaattgaaggaagacaaagggagagaagttgaactctgagttgtgtctcacaagactctcattcatcaaagttacaacaagtgttacacatgcttctatttatagactaggtagcttccttgagaagctttcttgagaaaacttccttgagaagcttctttgagaaaacttccttgagaagctagagcttagctacacacacccctctcataactaagctcacctccttgagaagcttccttaagaagattcctaaagaagctaaagcttagctacacatacctctctaatagctaagctcacctccttgagatgagaagctagagcttagctacacacccgctataatagctaagctcacccccatgagaagaaacatgacaataacagagaaagtccctattacaaagacaactc

SEQ ID NO: 35421 - DNA, 342 bp, Glycine max
  unsure at all n locations
agctttatgccaattcatacgacaataactntttactcggatgtctgattgagtcccgcaatataacgaaacgctcgaaattgaatgcttaagctctgagccaattctaacgataataactatctactcggatgtccgattgagtctcataatatatcgacacgctcgaaattgaatgtcgaagctctaagcctattcaaacgacaataacgttctactcggatgttccattcagtgacgtaatatatcgggacgctcgaaattgaatgttgaacctttgagccaactcatacgacaataactttttactcggatgtctgattgagtcccgtaatatatcca

SEQ ID NO: 35422 - DNA, 507 bp, Glycine max
  unsure at all n locations
tattacggacactatagatactcagctanacattcaatttcgagagtctcgttatattacgggactcaatcagacatccgagtaaaaagttattgtcgtatgaattggcttatagcataaacattcaactttgagcctctcgatatattacgggactcaatcagacatccgagtaaaaagttattgccgtttgaatttgctcagaggttcaacattcaatttcgagcgtctcgatatattacgggactcaatcagacatccgagtaaaaagttattgtcttttgagttggctcagaggttcaacattcaatttcgagcgtcccgatatattacgtcactgaatcggacatccgagtaaaaagttattgtcatttgaattggctctgagcttgaacattatattacgagcgtctcgatatattacgggactcaatcagacattcgagataaaagtattgtcgttgaattggatataagacaacattcaattcgagcgtctgatatata

SEQ ID NO: 35423 - DNA, 424 bp, Glycine max
  unsure at all n locations
agcttctcaagcaagcttccatcaacacatttgcatgtaggaggaatagtgaattgggaagatgacatttcaggacctcgcattcttgctctctctctctcccacgtaagtttctcctctctctctttattttattttatcaaaatggttgggattaggtggaaaatcccattttcgtaggcccacatgtgtttttctaatgggagttgataatggtccctactaaaattgctattggtccttacaaaactntaaaatttgaggaaaaggccaatttaccctctattcagacactccacccctccttcccccttcttcttactattgcttatgttcttctcaaccccatgttaaatatacaatggaaatacaattctattgtaaacttcgttaaaaaattaatacacaacgcanacatgatttt

SEQ ID NO: 35424 - DNA, 482 bp, Glycine max
  unsure at all n locations
gacctatgatactcagctggttaagcggaagaaaggataacagagactgacgagatgaagatgaaagaaagcaaaacaagaatgaattgaaagcctcggatttgaacacttaccggttgaagaccgaaggacgaaccaagaacagatgaagaacgacggaaaatcttcacaaaattgctcacagaaactgtagacaaaggatcaagctgaaagttttgatgatgccaaaggattacatgaatcacatgcttctcaaagatttactcaagacaaagcaattagagatattcaagatggatgatcaagacagtctatagagtcttagaaagggtatattaaataggaagggaattccaattgaagtagcacaaggtttggccaagaattntaagttanaaagtctttctcaacanatntactctctgngtaatcgataccagaggatgtaatcgatttaccagtggcanaactgatttacaaca

SEQ ID NO: 35425 - DNA, 423 bp, Glycine max
agcttccaacttagagatagagatcattgtaaaaggaagttctggggtaaaaagtaactataagcaatctacggtgagcttatccagcgaatcaaaacaggaacaagaacatgtaaaaaataaagttgaaaatcagggtgctggtaatattccaagatacttgaatcttgaaccatcacttgcaatggattggcttgagataccatgggatgatttgcgaatcaaagagcgtgttggtgccggcaaattttctgcttcttctgtttcctttttaaagaacatgactgatatgccaaatcttaatactcttcgctatgtgtaggatcatttgcgactgtgtatcgtgctgaatggcatggatcagtaagttttgaattagttcttctttgctgaattctatgcatgtacaagttcatgaatatt

SEQ ID NO: 35426 - DNA, 449 bp, Glycine max
  unsure at all n locations
ctgtcaagtagcatacatggtaacggagttaggatgaaggaccattttcacatattttctaaaattcgaggatcaaaaccaatgaaaaataaagattaagggccaaaacaaaatttaatcaatttttttagaaccaaaacatatttaatcgtataaattattttaaaaaacttaaaaatcatcaagaccataataaaaaatttaaaattacatttaattctattttaaaaaaatatatatgtttaagccttatttaagtttttgcccaccaaagaaaaatgttaatgtgagtnttatctatcatcaatttagccctctattgttgaaaccaacgatgttaattttatgattgaaacaatggtcttgcttgacactaattaagaaattaanagagatacaattatattaaaaattatgtgagagcaatggtataataatcgattcagttc

SEQ ID NO: 35427 - DNA, 404 bp, Glycine max
  unsure at all n locations
agctttataaacgccagctaaggtagatagaagttgattgtatccattaattaattattctttggattcgaatattacctcttcaccatcagagttgacagtatcatctagttgagagtcctcatcatctgaacttgtgtccagtgttaggtctactttgctggtggacacatcagccattagacatagtttggcttgttcctcactgtcctcatcaaatgagggatcgtctaagtcatcccaagtgctcaggaggctcttctttttggacttgaagaattacatcttcttatctgttgctattcaaggtcaagatatttcaacttcaagtgccctgngttcttgcactcatagcaaatgattggaattttctctttcttgtggaaggatcttttggacaattc

SEQ ID NO: 35428 - DNA, 487 bp, Glycine max
  unsure at all n locations
tatgcgcatatttccttacaaatgttctcttgcacaagacattctattaaccgaaaaaatgcacccatatacaatcaaggcagctccgttacctagattatttacacgtatttccaaggtgtatttgttacttacatcacacacatctccttggctaaattcacatacatgcatacccaaagcattttggggtaccaaaaattgcacatgtacacctcttggtatttctaatacctatacatacacaaactttatgatgaatcttgactatctacacaataaggtgctacatttcatgctcttttcaagtttttgctacctaaagccgcatgcaaattccagtatattttcctttgctgactaacattgtattcaaattaaaaggtatacatcttttgataatgtatcttctttacataacatgcaacacatttantgtatattntttgtgagacattntgactaccanaaattatatgtacataca

SEQ ID NO: 35429 - DNA, 421 bp, Glycine max
  unsure at all n locations
agcttggcccttctccttttatgtttcaaaaagtatagctagaacatgttaactatgaaaaggttattgaaaaaggttggagccattaatttgttggttgtcctatgtttgtcttaatatgcaagcttaaagtcataattatgaatctaaataaatctttctttggtgatattcatgataaagttaattcttgttataaacctattgaagttatccaatatgaaattagccatgntgtattatgtgatgcttggaaagacaatgatgctaaagcccaattagatcttgatcaagctctctcttgcatgagactctctggaaggaaatagctttgtgaaatggaattgccattgtaatacattctcatttcacatgactcaagtacatcaaacatcaaaacggtttctatacttcgtaatgg

SEQ ID NO: 35430 - DNA, 452 bp, Glycine max
tgtagaaagtgtctgtgataaggtgaacatcaagatctttatccttaccaattcttactcgttcaccaatgttcaagcaccatgttgcacttgcaacggtaaaaatgtcttcaatcacctatactctagccaccatgtcagtgatatgatccttgaagaggtcaacatcgagatctttatctcaaccaattcttactcattcaccgatattcaagcatcacgttcttgcgatggtagcaatttctacaatcacctatactccagccactatgtcaatgatacgatccttctctatcaatacatttctctaaaattctttgaacagttcaacaataataactttgcccttgttgaagaagttaacgatgtcatagagaacaaagttattcttacgtgcaatccttatgtcttccaacatgtttatgttgaactgatgttcaatatgaatcatt

SEQ ID NO: 35431 - DNA, 424 bp, Glycine max
  unsure at all n locations
agcttaaacaaaatatgaaccttctctcaattaaccctttgttcatttaattactaaaatagtttaccatagaactatagatctgcctagagaacaaggctcccacccactagggtagatatatgtagtcttaccctcacaagtgggaaactgtttccatgatttgaaccagtgacctccaggtcacaaggcagcaacctgattgttgtgccaagactcactctcatagaactccaaattaagaagtctgaacataccatatgattgatgaaagaaaggaaccaaaagtacataaatccaaggaacaaagcttaagagttaagaattttatgcaactaggtaacaataatcaattntaatatgttntatcattaaaattataattattaatccaataaattaccaatcaataattacttaattc

SEQ ID NO: 35432 - DNA, 398 bp, Glycine max
  unsure at all n locations
cgaggaatcttagggaaccgctagagacgctgctatcactgccagactacacacatgagcccgcttagaggtaagggatgagtntatcgcaattagggttagaatgaacatgtgtaaggatccttangggattaaattgaggcttattttgggatgtttattgtattgtaatttttcatgtatgattataattttgagattgttatattgggatcatgaaattgtgattgaaattatgtgtaattgataaattgcatatatgatgaattattagataacatgttgctttgagatcataacattgttattgagactgagtattagttcaaagtgttacatgtgttaatttgtgagatactacgttacatgtgatggttgattttgacatgatgagatgt

SEQ ID NO: 35433 - DNA, 424 bp, Glycine max
agctttataatttgtattaacaacattcagaaactgctggtaatcgattaccatatatgtgccatcaattacacaatgcaaattttgaattcaaattttaatagctgttgtaaatcagttttggccactggtaatcgattacatcctctggtaatcgattaccagagagtaaatttgttgaaaaagactttttaacttaaaattcttggccaaaccttttgctactgcaattggaattcccttcctatttaatataccctctctaagactctagagactgtcttgatcatccatcttgaatatctttaattcctttgtcttgaatacagctttgagacgcatgtgaaaactatggcattatcaaaacattcagcttcatcctttgtctacaatctccctccggatcgatgaccatccacaatgt

SEQ ID NO: 35434 - DNA, 374 bp, Glycine max
  unsure at all n locations
atgaagtggctngacctttccatactgagtatcatggactgtattctcctacttttggaacattattttatctcgaatatctagacttgtcttcaaacaagtttgaaggttcaattcctcccaaattgtgtgctctaaggagcctcaaaacattgaacctttccaataactcgctggtgggagagataccaaacgaacttcatggccttgagagtctacaggattttcatatattcaacaatcacttgagcggtttgataccatcttgtgtagggaattggaccaatctgagagttgttgctgcttatgagaataattcctatggaacgtgtacaagtaaacttggatctatttatgagcttacaacacttaac

SEQ ID NO: 35435 - DNA, 414 bp, Glycine max
  unsure at all n locations
agcttgagatgatgaagtgtctaagggtgaaacttcctgctnttattgttgaccacagagtggtacctggagatatgtcgcgggggtcaggagaccttggggacgtcatgtggggtgctattgcccaaaaccaaacttgaccaatcccgacccaacccgggcatagtcggtcagtgagaacctgtgatgtacctaagcatgcgagctcctgtctgtcaacagataaaaggaacaaagaccacctagcaaggaggcttgtggtaattggccagctgtgaaacttgactgataatgtgagatatggtctctggtaatcgattaccaagggtgggtaatcgattacaatgcttaaaaatgaagacaggaggctaagatggtctctggttatcgattaccaaagcgtgtaatcgatta

SEQ ID NO: 35436 - DNA, 233 bp, Glycine max
  unsure at all n locations
tatgaaagctcttgagcatgtcgaatggtcatatctttcacacgacggtcagactcacgtgcataatatatcgcgacgctcgaaactgatcaacggaagctctacatacattcaaatggtcatacttgttactcggacgtgcgaatcatgggcataatatatccagacgcttgaaattgaacaacgcgaactcncgagaagttcaaatcggcataactttttactatgaggtc

SEQ ID NO: 35437 - DNA, 367 bp, Glycine max
agcttatccttatggcttgcctccggacttcactccccgtgccaccccagaagatctaagccaagcccctactttcgaggggcagctcccaccttatgacgactatcccgggcaagacgatgaggaaggagatacccatctcggtcccctgctccacctcaaagatctgtccccccatgaactaccccaaccaaacatagtccgccatatcccgacttcacccacactcgtaaaagaatctgtttccttcgtggaagataaaggaaagattgacgtgcttgaagagaggttgagagcagtccagggcctcggcaattacccattctcggatctagcggacttatgtctcgtacccaatatcgtcatt

SEQ ID NO: 35438 - DNA, 397 bp, Glycine max
cccttaggcacttgtctatctttcgaatatgcttggacaaactgctgccgtgaagaatatccaagccgaggcgctttcgaaatgtttgcgtaacgttgtcgtgaggaatttctcgaaagtttcgaccgttcttcgacgctcttcattcgatcttcatcgttcttcaatcttcaacgggtaagtacctcgaaccaagcttttcgattcattctatgtacccgtggtggtccacattgtgtatcgtgaattgctattctgcgttcatctacttgttataccgccttttgacgtgcttacgccatattatatacatcatttctcgcttagcctgataataagataaatttccaccgatcgcttgaattgtattatccgctaactacggcttatatgaatt

SEQ ID NO: 35439 - DNA, 419 bp, Glycine max
agcttccgtctgtttggaatggaactgctacggaagattcagaatttgcaccttctcactatcagctgccaaaaacagtggtgaacacctagacttgttcaatacatggaccatatctttatctctttgtaaaatgacttcaaccacattaacatctccactatggacagcctcatgcaaaggagtgtccccaagatcattcatctctattgctatctttctatctttcatcacatcatcatgtgttgacttcactaatgcatattgtgaaacaatgacgttgaccatagtcgtgctcttggaactcaacacaccatgaagtggagtgtgacctcttacatttcccctaatacgaagtgcatgatagcgacacgacaatcactctactatcttttctgtcccttaactgctgccacatg

SEQ ID NO: 35440 - DNA, 368 bp, Glycine max
cttcactaactcagaatagacaggtaactgtagagacatgaatgttatatgattggaatttcaaatgcttggaagcattcaacattctcatttgagaagaactccatatctatgaatattgggtctacaatggaacgagaggaatagaggtttgtgtaccatatacgctgttcctcttatgagaataatgacccatagggattgcagggaggaattggagcttcctatgacccagaatgccgatgactccgactcgaagttgctttccgccatttgaagagttttttcgggatttctatcggttctaatgatagagatcgatgatagatgaacgttgtgctttgcggtgagtgatttcgacaagaatt

SEQ ID NO: 35441 - DNA, 389 bp, Glycine max
agctttatctagataagtatgatcagggtttttcacaaactgagtagcacatggatttttctcaaaacatgtttaccaaagagttttactctctggtaatcgattatcagattattgtaatcgattaccagcatccaaatggatttgaaaaagctttcaaactgaatttacaacgttccaattaatttcaaaaagctgtaatcgattacaatcttttggtaatctattactagtgccattgaacgttgaaattcaaatttatatgtgaagagtcacatcctttcttataaaagccttgtgtaatcaattacactaatttgataatctgattaccagtgattgttactgaataaatcacaagatgtaactcttccaaagggtttgacttt

SEQ ID NO: 35442 - DNA, 592 bp, Glycine max
  unsure at all n locations
acctcccgctctctcgccatatatagaataagagagttggcataattgtgtatctcccnnccccaccccgcgagcngtngatagtgcatcctactacnacnganctatanaaactcagcttgcgaagttgttggcttctatacctcgaaacttgtgctattcctccttttcattctcttcttcctgtgcgtaaaagaattcgccaaagactaaccgcctgaattcttttgtgtctcccttctcccttgtcaaagaattcaaaacgacacattctgagaattctcttgattcgctcctttcccatatacgcatgatctcaagggactaatcgcctgagaattcttttgtattctcatgcaccaagatgcaaaggtataaccgcctgagaactttgcttatcacattgcagggacatcctttgtggtacaagtagagcgcacatcttcttgggtatgactgagaacaatatacactacatcctcttgggatcatctctatcggaatgtccttccactagatgtccaatagaacatgtatggacactccttggcctcctttttgaacagattctcaagtagcaaaaatactactc

SEQ ID NO: 35443 - DNA, 423 bp, Glycine max
taaatatatttacatgtatcagatatatatcaaagtatacaaatacatatatatatatatatatatatatatatatatatatatatataataacgataataataaacacatcatgagataaagaattatatatataactacataaaagtagttaaacatattatagacattagatatatatatatatatatataaacatagacttatatatatatatatatatgtatatatataatatagataacaaccacaaggttatatacatatatgttaaatgcattctaaagaagatatgaaaatcctacagtgagagacaatatcttgattttgagcgcgtgagcatcatcacggagaattaatataattttttaagagttatttcaagaggtaaatacaatttgagagaatctatctgtggcagcg

SEQ ID NO: 35444 - DNA, 370 bp, Glycine max
  unsure at all n locations
ccagggtgctggaactacttcattttgacttgatggngcctatgcatgttgaaagccttggaggaaagaggtatgcctatgttgttgtggatgatttctccagatttacctgngtaaactttatcagagagatatcacataccttctgagtattcaaagagttgagtctaagacttcaaagagagaaagactgtgtcatcatgagaatcatgagtgaccatggtagagaatttgataacagcacgttcactgaattctgcacatctgaaggcatcactcatgagttctctgcagccattacaccacaacagaatggcatagttgacaggagaaacttgaccttgcaagatgctgctctgcgcatgcttca

SEQ ID NO: 35445 - DNA, 385 bp, Glycine max
  unsure at all n locations
agcttgcatctttattaatatagttaataaaaataataactatacaggagctacgcctctgttttactacaggtatactttgatttaattaatttttccattgtttctagtctaggaattaggatataaacatggttctaaaaaaagtatgtggccatcaatgtgtgtagatacactctaagattgtaaggagaggatatatatttgattctaaaagaatatattatggtgaagataattggagatccaactgaaaaaccacaaaatattaattactgtgttaaggatggtgcaaaacatatatggtgattacaatttacaaccattngaattaanagataattaaccatgtataaaagctataatacattaagagaatattaat

SEQ ID NO: 35446 - DNA, 489 bp, Glycine max
  unsure at all n locations
ggaagcccttagttntagttntggtttaataattntgaaatgtttaacatgtttaatagatgtggcaattgtcttgaatgttttagactangcatgtgtgtgatatagtctaagtctttttaatacttagttttgatcaaatgtaaagtgaatgaagtattttatttctctaagtttcctaagtacaagcaatagaacttacttctacttgaaatttggttgtaaccatcgaattaattgattgcctagcttggtaattgagtgcctaagccagattcaaaagaaggaaggatgtatagcttaggataattgactgctctgtctctggaaacaatgagaagttctctatgtgattctacaatctattaccacatgtgacaatcaactacccagagagcacagaagcaatagagatactcaaactgaaacacattaatcaattaccctctctataatcaattatccaatttctggaaatgcataataaac

SEQ ID NO: 35447 - DNA, 403 bp, Glycine max
agcttctagtatttatagtcattcttcttcaatctaagagtctgctgtctctaaatggatataatcattcacttgagtttgggtttgaatattgtggtcgttggagaatttaatgttggtgttaaatacacatctttcttcatgctagaaaaccactctttttagcttccttgaagaacacttcaataggaaatcacttgctcttcatcaaagtaggtctatcacaacaagatgcatcttttgatgttcttttgaaactccaaagtggtgaacttcatttattcttcatgagattcgacagatcctaggagaatgtcttgtcatacaattcttataaaacaaatcttagacactaactattatatgaaatcttatatgctatattagatcataatatatatat

SEQ ID NO: 35448 - DNA, 433 bp, Glycine max
  unsure at all n locations
tataccanatattatatatattagtggtatactcgtatcaatcaaacttagaattgaagctagtgcagccaaataatatgtcatgtttgccacagaagttctattcatgggcttttaaataggtattagaaatagtgacaaattgtcttctatctctgaataaaatcatttgacatttagtcatttagattatgtgtctattattccatgctccaatagatcaaaagtcaaagcactgttctcttcttttataatctaaactacacttctctctcaaacttccatcagtatgcatgcgacttgagggtcattgtcattttatgaaattgccgctgagtttcacactgactaatatgaagacttggtaaataacatgaaagttatagtgaccaacgtctcgatgatgtctaagacgattctgaggacgaacatg

SEQ ID NO: 35449 - DNA, 426 bp, Glycine max
  unsure at all n locations
agcttgcaaagttagaaatatcttgtttgattccgatgttgtgaagtcaaggaaagatttttctattgccatgatgaggtcatctatagttttaggagcctctttgtgttgtaatgactgaatggcattaaagaagccaagatctaagacattaaaatcaagcaagtttgggggttgagaaaccaatcgaatgtcaaaaccgccttcactagcagcttaatggaagtcgttgtcatcttcatcaatgtgacatggagcattgtcttgttgtatgaaaatagtctctcctctatccnctattggccattttgctttgattgcagacaacacatgatgaataagaanatgtttgcttacttgtttaattattgaagatattggttntgttccatagtccctgtatctcttgttgcactccttctcttt

SEQ ID NO: 35450 - DNA, 471 bp, Glycine max
  unsure at all n locations
ctgaaagtgttggtttcaccttctcgctaagccaatccgctggcttagtgagcgtccgctaagtgcaacactcattggctaagcgcaaggaagaatctggaagaagatgagctatacaggttcgctaagcgcaccatttcatctcactaagtgcaccacttcagtccatccgttaagcgagaaaggcacgcgctaagccgaaattcactaatgtgcactaagcggtccagaattgtgctaagcacacgagcacgaacaaggccacttatttaagcctgaaatcagattttaaagggggagtttgaactgggattcagagattntcatgtcttgagattctagagagagaaaggtccaagttccagagagttntgagagattatgttgtgtgaagaatggcagacaccatagctggaagcacgagccgatttgagagctcgagatgagttngtgagtgattgtgagttccta

SEQ ID NO: 35451 - DNA, 376 bp, Glycine max
agtctttgtattcaatttcgagcgtgtcgacatattacgggactctatcagacatccgagtaaaaagttattgtcgtttgaatttggtcagagcttcgataatctatctcgagcgcctcgatatattacgggactcaatcatacatccgagtaaaacgctattgtcgtttgaattcgctcagagcttcggtctttaatattgagcgtctcgacatatgtctggacttatctccacttccgagtaaaaagctatttgggtttgaatttggccagaacttccggattcaaattcgagcggcacgatttattacgggacttaatctcacatccgaatcaaaattattgacgtctgatttgccagaacttcggtattcat

SEQ ID NO: 35452 - DNA, 405 bp, Glycine max
  unsure at all n locations
ntgagcaaattcaaacgacaataaagttttactcggatgtccgattgagtctcgtaatatatcgagaagctcgaaatggaataccaaagctctgagcaaattcaaacgacaataactttttactcggatgtcttattgagtcccataatttatcggaacgctcgaaatagaataccgaagctttgagcaaattcaaacgacaataacctttttactcggaagtcggattgagtcccgttatatatccagacgctcgaaattgaatgttgaagctctgagcaaattcaaacgacaataacctttatactcatatgtcggatagagtcccgtaatatatcgagacgctcgaaatggaataccgaagctctgagcaaattcacacgacaataactttatactcggatg

SEQ ID NO: 35453 - DNA, 357 bp, Glycine max
  unsure at all n locations
agctntttcttatggtctgtaccacacattattataacgaacacccttaatgtcataaaccataagtttatgattaaaaaaaatgttgtttagcatgacctattaggtcatcccatgtcaactataatgtggaaaatatttaaaaattcatgtggacatccatggaagagccagaagattcttcagtccaatgatttctcatgtactatttattctcaaaggaagttggtaattacactatcaccaagaaaaattggaaatgagtctattttatttttagaacggatataatgtgatatttgtggatcaatatattcaccatatggatcatttagatatttcatgatgcatcaacta

SEQ ID NO: 35454 - DNA, 459 bp, Glycine max
  unsure at all n locations
attgagtccgataattcagaatcttcatctggcaattgtgttttggaggcatggaagttaccaggagtggctccgtttgctttctgtctctttttctcgaagctcgtggcttacactnttctgtactggttgcccttctacataaggcacacaggtaatcattattattatattacatgaaaaattatgatatatatagagttgcattgccttttatctaacatcagcatgttattcatatgcgaagaatttattactagtgtcttcatattcctgatatattgtctcaagggtttgtcactacgaatttggagtgcttgtttggtaggactggtatgtgatgtgtctttaggcagatatgaatctgtgtgacaggtattgcatggcggtttattagcatgtatggtgcaatttgaatctggagaaataattgtatattttcacaagctctctcagcta

SEQ ID NO: 35455 - DNA, 429 bp, Glycine max
  unsure at all n locations
agcttcttcacatagtccgcctttgcttgaccttctttatgcttaanaacagaaacattaggcataggcaaaagatcaagaggagttagtgggttaaaaccataaacaacttcaaaaggagaacaattagtggtgctatgaacagctctattgtaagcaaattcaacatggggtaaacaagcttcccaagtttttaagttcttcctcaaaactgtcctaagcaaagttcccaaagtcctattaacaacttccgtttgcccatcggtttgtgggtgacaagtgagtgaaaataacaatttantgcccaacttgctccacaaagacctccaaaaatggcttacgaacttagagtccctatcactaacaatgctccttggcaaaccatggagtctcacaatcttcttgaaaaacaaatcagccacatgggaa

SEQ ID NO: 35456 - DNA, 449 bp, Glycine max
ctcatgagagagtcaaagatcaaactgagaggagatataaaagctatgtctttctagccaacaaagggagaaagaaggttgtcttcgaacccggagattgggtttgggtgcacatgagaaaagaaaggtttccggaacaaacgaaatcaaagcttctaccaaggggagatggaccatttcaagtgcttgaaagaatcaatgacaatgcttacaaagttgagctgcccggtgagtataatgttagttccaccttcaatgtctctgatttatctctttttgatgcagatggagaatccgatttgaggacaaattcttctcaagagggagagaatgatgacgacatgttcaagagcaatggcaaggatccacttgaaggacttggaggacctatgacaatggctaaagcaaggaaagcaaggaagctcttcacaagtgctgccatactattt

SEQ ID NO: 35457 - DNA, 406 bp, Glycine max
agctttatggtatttatcgggatgtaaggcgggagatcgatctcccgattcatatcaaaccccatgtgtgccaaattaccttccaagtaatggacttaaatcctacctacaactgcttattaggccggccttggattcattctgttggggtggttccgtcaacactgcaccagaagctaaaatttgcggcggagggacatttgattatagctccgagagaataagacatacttgctagttgtccatcttcaatgccttatgtagaggctgcagaggaatcattggaaacatcctttgaagcattagaagttgtgagcaatgcttacgtagagtctcctccactgcagccgtgctcatctagtgcactttgatagttgctcaagtgatgttagggcaccgatattat

SEQ ID NO: 35458 - DNA, 498 bp, Glycine max
  unsure at all n locations
attgatgccttgtaggaccacngatnagaaaagantcgntatagatatatgggctctagctaatcttggaactcantgttcttgctgcttataacctcaaactgactgatggtgcatgtaatcaccatcgtttctattagattcttgctcaaactgtgtcattattccaccaaggaggacctgattgtgccctagcctttaccagttaccaccacttggcaacaacccttcaatactcctttagtgactttgagcactcattacgatcctgacttcctcgacttcgagctgtaagtgttggtccatcggcagggatcatcactcgttgatacttaatggcaagactggcactatcataaatacacctatcaccttgtgcacaagtgactttgcacattccgcaagctgagatgacgaccttatcctgcattagataggatcatctctggcccttagactaatctacgcgcgcatactcttaattttccgcaaaacgac

SEQ ID NO: 35459 - DNA, 422 bp, Glycine max
  unsure at all n locations
agctttactaattaataatgtactcttctaaggcttttactatgttgttaagtaaatgaagaatagaaaagaaacttaaccaaaagtaaaagcgggaattaaagtgcatagtggaaattaaaagagttgggaagaaggagacaaacacacaagagtttttatactggttcagcaacaacccgtgcctacatccagttcccaagtgacctgcggtccttgagatttcttttcaaccttgtaaaaatccttttacaagcaaagatccacaagggatgtaccctcccttgttctctttgaacaacctagtggatgtaccctccactagaactgatccacaagagatgtaccctctcttgttctcagtcaacaacccaagtagatgtaccctctacttggaccacanaggatataccctccaatgt

SEQ ID NO: 35460 - DNA, 485 bp, Glycine max
ctgctctagacggtccaaggtagttatcgaacgggtggagtctaccatgcttggagtgctcaatgaaagcaccaagttgttgtgaccctgcacttagcctagaattcgaggttctagggcctccacaagaatatgagggaaaaggaaattgcttgtattattcactccccatcagaattacataatctcctatttataagcttttcatataaattctagaatgaaatagaagatacaattctaacggtttctggctttctatgccttgaaggaaagctaggaatatactgatattgcttcagagaatcctttctaacggtccaggatctttggagaaatgcttctagatggtggtgacctggctcttgatgcttactatgattattttgcaacataatcctccaagtatctcaggttaatacctcttctctttccttacataacttctgcattgtaccctgatgcttctctgtgcatatcaaata

SEQ ID NO: 35461 - DNA, 403 bp, Glycine max
  unsure at all n locations
agcttangtcatggttcagtgtatggtttccttgagcctcggcctatacacaatactaaggatagacgtcaagaatgtcatcattacattgaagcatgggtgaaggattcgcaacggcaattgtacttacgagcttacttgaattagtaagttaaaattatgtagtacattctaaaaatatttgcattataagtacctaattataattgtcaactttagggcacattggcaacttgttgttctgtgtccacgggataatattggtgtttggttttgttctttgtgaaagaagcctgatattaacatcaaagttgcaattaacaagtcttttaataatttataattgatttagcgtataactattgtactatgtcaaatggattgtgatgttatatatgtttat

SEQ ID NO: 35462 - DNA, 432 bp, Glycine max
  unsure at all n locations
cggccaganacaacctatatactattatatatatttccttttgcatatctataccaataactaanagggatacctcttttgataaccatcttttggtctccatttttaaaatgattattttactcttcaaaacttacatttttttattcatgtaaccacccatgttatataaattgttcattgaagtacttactttatgtaaattgtttgctttcttcaagacacaataactacctatattttcatttttttatgaatgaagccacaacaaatgttctacactgtaatttgtagtaagttgtggcacaacaaggtagaatggcagcggcataggcaaactgtgacagtgcggagatggacaacgcatagtcctattgtaggagcctcaaggagaattacgagaatatgtgaataaatattgtctttacagtt

SEQ ID NO: 35463 - DNA, 398 bp, Glycine max
  unsure at all n locations
agcttgttcgcattcttagtgaaggaataccgagacttgtgggccgttgcacccatttagtctcacattntttctatccaacaacccaagagtccgatggcatgcggagccaccttacgcttatccgcacctcctcattcggagaccccaagttcgatgacacgcagagaccaatgtggtaatctgcaccctttctcgagatgtcagcgtcttccggtcgagacaattttagtctcacatttttgctatctggcgacctaagagttcggtggcttgcagagaaaccttacggttattagcacctcgtcattcggagaccccgagtctaatgacacgtagagaccaatgtggtcatctgcactctttccggagctgtcagcatctttcggccgagacta

SEQ ID NO: 35464 - DNA, 390 bp, Glycine max
cctcattgtctctcacagactttagaattgggagcaaatccaatccttgtgtccggactctcagtcacttatggtagccgccgatgatcccgttactgcttcccctaagctctctgtgctttcttcacaccgcatcacctgccttgcgaactccttggagtacctttgcatttgggtcactgaaacctcgtgtcatgaaaggcgtgatgctttcgtctaatggcgctcctctcatggggtagccaagctgtctcatggcgaggacggtattataattaatacaacctcttgttccatcaagggaacatttggacatccttcgcatgaagatagaatcctgaatcttccttccttctagcgagggaaccaaataacaaacgcctctctatg

SEQ ID NO: 35465 - DNA, 568 bp, Glycine max
  unsure at all n locations
cctctctctgctcctctccgcaagcacgcagatttaatcatgttattgtcaatcccacacaccaaanncnnnntgttgcgtcgtctatcacacggcgaancgactcgtacccgggatcctatagatcgacctgcagcatgcaagctagttctaattctacctaactcgccaagctatcgggaggaactttgtgactcttactacctacaaactccttttctctttattaagtacagctctgatcgaagataaccctcactaaactggcccttatcatatgcttctgagaagatattaaagtcacgtcactatcatctctatgactcttcacgggagcaactgatcaaggcacacaatgcccagctcttttcacaaggacagttatttattatgacatggactaactgatactccgcatcgacaacgaacacaaatctaggacgaggtcactataccacttgtagtacatagagatctgctggagaaaccttggataataactaagttactcttaacacagcaagcccagatgatattcattggcacttctcaagataacgcggacacc

SEQ ID NO: 35466 - DNA, 242 bp, Glycine max
gtggagctttatggagtgagacaatagtgcacttacactgcaattgaagagcaggggagcacctatggatatgagacctcttgctgtgaaagggttgcgagatatggatgcagaccatgaactgcttcctgctggaatgatctttggctaaccaaagaaactcatgtacatgatcatgctgatgctatatgacgcaatgcttaaatccatatacacgcctacacatacagtgcaaaatatat

SEQ ID NO: 35467 - DNA, 426 bp, Glycine max
  unsure at all n locations
agcttttcatatggataaaaggctcacattcactttcttctacatcatattcaaacttgtccaaataaataataaagtcatctcgactcacagaaaatcatataagtctcatacaattaatatagaacctatatcctaatgtcacatcctatcagagcgtggtgtttccatgtcctctagcacgaggatcttcatagtcatccacctattcatctgctcccccgaacacaagttcaagatcatcacaggatccaaacacaacaacacacagggagtgagttatcacattcctagctaatagagaaacacgacaattaaatatacatattatataaatgagataccacttgcttaaacatagctcacgtaacttcaccacttcatcattcanaattcactttgcaattatcaatcacattacacaag

SEQ ID NO: 35468 - DNA, 478 bp, Glycine max
  unsure at all n locations
ccgtatagtttatcaattcaactcgagatttgatataaacatccaaatttcaatgtttccccaatgttgatacagaataacagcgatactcattntaatatacagagagggacatgctatgatacggcaatgatataagagaatatggcaaattgcaacttataaattaatttaaaattaagtttaatcatcatgcactcacaagtttaatggtcaatcaatcataaatctttattaatatataacttttaaggtataatctattttctctttaaaattaatttatttcctttttaaaaataaattagaataaaagttcagattataagagaattcatattctagaaatgaacataagtcaatatatacataaaaatgttaaaacttatataattagtatgagattctaatttatatttggatacaagttaanaaagtatacgtagaaaattatgacaataacataacagtatccata

SEQ ID NO: 35469 - DNA, 423 bp, Glycine max
agctttaatgtccctctggtctttacaccattgttttatagtgtatctcaagttcctcaacttatttttaagggcaattcccccccccccccaaccaccctacagatctgtattccaagcctctttgatcatagagtggtaccctttatgattaagccaccagtccacaacccgaaaaggcttagggccccagtccaccatccttgtcttcaaaatgattggacaatgatcagaataatctctttgaaggacatgttgggaagtatcaggccacaaggataaccactgatcagacaccaagaatctgtccagcctactcttggcactgccattgagcctaaaccaagtaaaatagctgccaaagcatctaatatcatggagctccatctttgatatccagtcattgaaatctgaggtatctga

SEQ ID NO: 35470 - DNA, 423 bp, Glycine max
  unsure at all n locations
tagttcaaggcagagttgtcccaaatatggtggagttatatgtctaaataaaattgtaccaaaattgtgggagacactacgtaaaggaatgaaatggtcgaagcatagcagcatacacacacagttttgggtgttcaaaaaaataataataataataataaaaactgtaagtataaataaaagtgtataaaagtgtgtgtgttgcaaatcaatgaaatgaaagttgagtgcctaaaaaggggaaagtagtgggttgggaattaataaaagtaaaggctgatgtatggatgaatgctcttctagaatttaagcttttgaatcctacaanaaccatgatttgttgatagcccaacctcattacaagcctagaaagcccttcggattcaatttgcgtatctaattatgtatggcatgagatgaaat

SEQ ID NO: 35471 - DNA, 240 bp, Glycine max
agcttgaatcggacctcagtgtaaaaagttatgaccattgaaatttctgcagagcatccgttgttcattttccagcgtctctatatgtgatgcaccttaatcggacctctgcgtgaatagttatgaccatgtgaatttctcgagagcttgcgttgtgcatttacgagcggcgctacctattacgcgtccgataccgacattcagggaaaaaggtatgaccttatgaattgcacaagagct

SEQ ID NO: 35472 - DNA, 401 bp, Glycine max
ttcgagtgcctgtatattgatgcgcctgaatcggacatacgagtgacaagttatgaccatttgaatttctcgagagcttcctatgtttaattttgagcgtctcgatatattatacgcctgaatcgaacctcagtgtgaaaagttatgaccatttgaatttctgtagagcatccgttgttcattttcgagcgtctctatatgtgatgaaccttaatcggacctccgtgtgaaaagttatgaccatttgaatttctcgagagcttccgttgttcaatttcgagcgtctcgacatattatgcgcccgaatcggacatccgtgggaaaagctatgaccatttgaatttctcgagagcttccgttgttcaatttcgagcgtctcgacatatgatgcgcccgaatcg

SEQ ID NO: 35473 - DNA, 385 bp, Glycine max
agcttgttgttgctgctccacagagcccctcggaacttgtttcagccgtgctcttccctacgagccctcttgggctgttgttcgaaggctttggctgttgctatatttatatctctcagatcggcattctcctttcggattctcagagatgctgatttgaacctttctttgactgtttgggcttgctcgagttctgccctaagggcctgcacctcttcgtctttcttcggtgcctcaacttcctcccttttagcggttctcatactcaggagccaatccaattcttgcacgtgggctttcaaccacttaccgtagccactgatgggcccattgttaccgcccctgacgtctttgtccctcttttgcaccacctcccatgccttgc

SEQ ID NO: 35474 - DNA, 477 bp, Glycine max
  unsure at all n locations
tcaagaattgatggcctcatcatactactagttccctgaacgcaattcaactaatctgcctcccattgttaatggagtgggttaccattattggaaaacccgcatgcaaatcttcatagaggctatagatttaaacatttgggaagccatagaaataaggccttgtattcccaccatggttgctggaaatacaacaatagagaagcctaaggaagattggagtgaggaagaaagaagactagtacaatataacttaaaatccaaaaacataattacatatgccctaggaatgaatgaatactttagggtatcaaactataaaaatgcaaagggtatgtgggataccctacaagtaacacatgaaggcacaacanatgttaaaagatctaggataaacacattaactcgtgaatatgaactatntangatgaatgcanatganagtatgcaagacatgcanaagaggttcacacacat

SEQ ID NO: 35475 - DNA, 412 bp, Glycine max
agcttgtatgattatggcgtacccatcacatgtggtactaggtggcggtcgggcgatggtgcacaataagttttccacatccacaatgcgcgcataaacccaccatcccctgttgcccacctccaactgagctcacgtactcccacgtagctcatatcctcgtttctctcaacaccaggtccccatcaatcctcccaagcttccccaacatcaaagtaatacaacattctcacagcacaagctatcacagctaagcaaaacagggcaaaggcagaaaactctgcccaaaacaccaaccaaaatcacagctgttcacatacaaataccccagaaacatttccttcgttccaattcgttaaccggtggatcgactcgaaaatattactggaagtctctagtacttaagcctaca

SEQ ID NO: 35476 - DNA, 471 bp, Glycine max
  unsure at all n locations
taatatatcgagacgatcaanattgaacaacggaagctctcgtgatattaaaatggtcataagttgtaactcggatgtccgattcaggagcttcacatatcgagatgcacgaaattgaacaatggaagctctagagaaattctaatggtcataaattctcacacggaggtcctattcaggcgcttaatatatccagacgctcgaaattgaacaatggaagctctcgagatattcaaatggtcataacttttcactcggatgtccgattcaggcgtatcacatatccagacgctcgtaattgattagcggaagctctagagaaattcaaatggtcataacttttcacacggaggtcctattcaagcgcttaatatatcgagacgctcgaaattgaacaacggaagctctcgagaaacttaaatggccataagttttaactcggatgtccgattcaagcgaatcatatatcaa

SEQ ID NO: 35477 - DNA, 432 bp, Glycine max
agcttatagagaataaagataagggatttgaataagcttataaccatgtcccaagagatgcattgtggacgactctggagaaaaaaggcgtggcactatttttttttttgctcagcaaaaatataatatatatatatatatatatagactagtaccagtggtactgaaattacataggaatagaagtgaatccagctattccaaaaaattgagaaagagctggagacacaaaaatgtgttacaagaatccacccacacccgccccccctaaatacagaatccttccttcagattggaggaccattggttaaagcgtatagcgaaatccttgtccattgctctgttccaagaccatagtaggagtaaagcatcgtcgagcagcttacaaccatgataagttccattttggaacaccaccttatttctatgctg

SEQ ID NO: 35478 - DNA, 629 bp, Glycine max
  unsure at all n locations
cgcctctctccgancgctctacttacatantactatgtatgtgtagtnatttacantaatgnacacactgttatcacaccnncatccctcagcncgnngncctttgatggtagcaatccatcngatnncgngcaannannaacctcgcgacctgnctgaatctatgtctctattgacgaggttatctaattatttaggctgaaaagagattgacgagagagatgaagagacgaacacacactgtgctatttggaacgatagtacaatcttggcacacaatattatgtgcaaacagcatgtgcactccatagtccattgataatacctgatttatcgatgacaatcatggcaaatgcacttggacctattgatgcacctgccataaagaatttccaccttgacatgaatgtcaccagcatctttatgtatgaaataatatattaacatacttattctgtttactctgaatatgattcttatgtattgtgggtgtgcctaaatctaactcaggatagcatatcgatcgatactggatgcaagaatcacacgtcaactctctgttaatgactccttcggtcatagcatatgatgtatgcaggcatcataagagtcacaccttttaatattcn

SEQ ID NO: 35479 - DNA, 432 bp, Glycine max
  unsure at all n locations
agctntaactgaagcactaagtaagttaccagctcaattgcattatggacaacctttaccctcttttgttttgtaggttgcaagttgtgttatatgtggtggggcacatgattctggctactgcattcccacagaagatacaacacatgaagtgaactacatggggaaccagccaagaccaaactttaatgcaggtggatattctggattttcacaaggccagcaatataataagcaacagggacaatggagaacgcaccctggtaatcagttcaataaagactagggttggccacctaacaggccacaacaacaagggcctagtctctatgatagaacaacanagctggaagagactcttgctcagttcattcaagtatccatgtccaatcanaagagcacaaagtcaaccaactcgaagctttaactgaa

SEQ ID NO: 35480 - DNA, 362 bp, Glycine max
attctcatttgaagttggagtctctgcatatatctttgacctcacagggactccgatatggttacagcttctaatgttatgagtggtttgctcacaccttccacatgtatagccagccaataatctcttgagcctatgtactatgagaatgacctcatctgcgaatctacttctatgcatctatgccctatactatatggacccaatatggcgtgcactagtactggttcaataagatgacaggatgtcttattatgagctggtcttgacgcgtcacttatgacgcatggcctcaggcatgacatctttgtgagctagtggtgctctggcatgtcaagatgtcatccctacatcaaagttgt

SEQ ID NO: 35481 - DNA, 370 bp, Glycine max
cgaaccgagctcggacccgggatccctaggtcgactgcagcatgcaactcagctttattatcatattcgctatcactcacctttcgatgcgggaatatctcacttctctgatgacaatggctttaaggagttagcccacttcttctctgatcagtcttcatcattcttcacccttctttatcttcttttgtgataccggtttcctactagggactaatgacaaacctgtggcacataatgctacggagagattcccacatgccagaaggacgcacagcacacagcgctgctctcctgcgtacacatcatatatgccactgcgctcatgtctatcgaaatccctattgagctgactacactactcatgcta

SEQ ID NO: 35482 - DNA, 429 bp, Glycine max
  unsure at all n locations
agctagaatttgagttggtttactcctaaaccaatgtctattctttattaaaattgaattgttttaaaaaataattaactaattaaattattttattccagtatactatttaaatataaaaataaagaaaattaattaattaattaaaatattttaaaaataaaagtaattaatttttgttatatttttaattcttttgaaactgtaaaattcttagactacaaacacctaagacaaagagaaaagacaaccgacaaatgctctaagtcttatccctaaaatcactgaatgaacggagttgcctgtccattgttgttttattgacttacaactggcatacactcttgcatgtaaaacctctattatcatctctgtaattggacttaacctctcagagttctagtgaatatntatgcaatgcttaagatc

SEQ ID NO: 35483 - DNA, 243 bp, Glycine max
tatgcccactatgtatattgctagaatatgtatgagcataaggggcgcacaatttgtatattcttgcgatcgactcagaaacatcatattacatattacaaagactaattctagatcatatttaattatacatgagaataatttctatcatacgatactaagttaacttcttctagtactggaccccatctctattcttatctactctattaataatatactatcttatacacactattactt

SEQ ID NO: 35484 - DNA, 426 bp, Glycine max
  unsure at all n locations
agcttttagttcctcccattaggttcctaaaataagggcacggagcaaacacgctacgtgtttgtttccttgatattgccatgcatatctttgcaatgtcatgtttgtgtgtgtctgttgtgttattattcaatggcattaccatgcttgttcatctagtatatttatgttttgtgctatcaactgcatgctcttgcgcatgtatatctatattgcgtcgtcacttatgcgttgcatttgtctcgtcattttgtcacgggaagttggaaggtccggatcaccttcttaaatgcatacatggggcactatggtaatgactgcanatgaaccatgatgctcgaatgtttgtgagtaagaagagatgatcttccgagctcttgtgtttgaaaatgcatttgtgtcatgcatggcataagcattccttca

SEQ ID NO: 35485 - DNA, 410 bp, Glycine max
ctcgcattctagacaaaccaatattgatgtagcaccaacctcattacaagccaataaaagtccttctgattccatttgtgtatttctgactttatggcatgagatgaaccacaaagattgctcctcttgttagatgatatcgctaaatagtttatacactcgtgcatgagtgatacacgagccgtgagaattgggctaagcatcattctatcataccctagtaacgtctggagaccattgtttgtcggcatgctaccttcgttagaccacctcagaatcatgaacacccatcattatggaatctgtccaggtccgagatgtttcggtaagaaaccgatcaagagctcacaaatgggagtgtatttagcatagcggtgagtgcatccataaactatcacactctaatttca

SEQ ID NO: 35486 - DNA, 420 bp, Glycine max
agctttccaatgtcttcaagcatcaaatcaatacaatgggctgcacaaggagtccaataaatatgtttccttttgtcctctaacaacttacccgctaaaacatagttactcctattatcagttacaacttgaacaacgttctcttctccaacttcctccacaatagcatcaagcaactcaaaaagcttttcacctgtcttcacaaaatcagagccatcaacagacttcaaaaacattgtaccagcttgagagttaaccaaagaattaatgatgcatctttgtttccgatcagtccatgcttcgaacataatagtacaaccatacttgacccattgctccttgtagtctttcatcagatctttagtgcagtcaacttccttcttcacgagtggaactctgatatcatgacagctcggaatg

SEQ ID NO: 35487 - DNA, 389 bp, Glycine max
  unsure at all n locations
gatactcagcttgtcttgatttttctagttcttaacaagctttgaacaatatacttgcccttcatttaactgtctctgggcttggcggccacgctcaacanagtactttcgacacctattgtacattgatttgaccaatgctgttatgggaatgttgcgataatccttcaaaccttattgatacattctgagaggttggttgtcatgtggccatatcgacatccttctctatcataagccatcgtccatttttcatttgaaatgcgatcaatccatgttgctatggctggactcagttcacgaaattttctaaatttgatcaaaatgtcttgcaggagtgacgctgctacattagtatgataaaatttaagatatctgaagtaataacg

SEQ ID NO: 35488 - DNA, 425 bp, Glycine max
  unsure at all n locations
agcttgaccaggaattacttgtatgggttggatgttgaattctggttgttcctggtgcggagatgatggtacagcgggtgaaccagaagcggaagtttcttttggtgaggtagccatggaaaagcagagcgtttggaatgatttcgtaaatttcagaaggctattgggaaatgctggtaaaaacacgaatgccaagcagatataaatttgaatgaggaatgtatagggtcgtgtgaagcaacggtcgaattttccttggttcagtagtgaacgtgctattaatgttaagtgattcgtttgggcacgttcagattgctgtagttgctataattnctctagcacacaaatgcccagcttgcccctcagttnttcaaactgatttgcatccaaagcctttgtgaacatatctgctatttgttcctcag

SEQ ID NO: 35489 - DNA, 443 bp, Glycine max
  unsure at all n locations
ngacaaacanagctaatcgaagcaagcaagaaataaaatcaattattgtcacaaaatcaatcgtgcaaaaggcatttgaaatggtaacatcttttaatattttatattcattttcttataagttatataataataacgagttttttattttgtgattgtttttatatgatatatgaaagtttggtgaaatttatataaaggcatcatgcattagattatattatttaatttgtcttttactatatttaattttaatagaaagaagattcaaaatatggtaaatggccatatgctctggaagtttggaaggccacacacatgagatctaatggaacttggtgcattccaaaaggagaagaaatcatggtaaagaanaaattcattttanagtcttggtgtcaatattagaattaaagacattaattggattatgatatcatatc

SEQ ID NO: 35490 - DNA, 424 bp, Glycine max
agcttgtcgcatctgctaatggcgatatagcctgaaccgtcattgtcattggtgagggagctgcttacgtggacatgtcgtcattgttgttggcgagaccggctgagtctggtgacgtggagagagtcgccaatgcttctggtgatatatgttgcaggagtggttctcgtcactggaaatggcgagactggtgtcggcggattctcttttcctttaaataggcagcctttgccttgaaaatttgtagtagtcttgataaaagaaagcacagaggagcgtgtttaatcaagaatttacaagccttactttcattatctctagatagcccagcttttgccttgaagcttctcattccatccttatttatttgaagcaacaatttatattgttgttcagtcaataatttatcagtcttgcattcatt

SEQ ID NO: 35491 - DNA, 483 bp, Glycine max
  unsure at all n locations
ggatgcatacaacctatatgctccaggttgagggggagagttgagatattatgtagattacagagatatatattaagagacatgatacgagttcgatttagttatatcagatttgatttgtatttatgtagatgagatcttttctatagtgtaattaggatcatatttctagtgccattgtatctttagaattacctctattcatgtatcctttttacagtttaatcaatccgaaatatacatacttcttcaattatttcctccagtctcaaatataccatgttgagtgttatcagcaacaaattttcagtataataaagtattactagctatttccagtccagttctatcagaatgtanaagaagggagttaagttcttacaacagcaacaacaccatcatatgagttaagcttcacatttgtcanagaagacatcacatcaaatgcctctcctgctctctctgtcacaatcacctagtaat

SEQ ID NO: 35492 - DNA, 425 bp, Glycine max
  unsure at all n locations
agcttgaatgtgtgtagcccaccattttccatagtagaatactggtaatgtgtctactatcattgtcatcgttttttcgtcattgaggtgccacttgagctgccaggttctccacctttgggcgtattctttgaaagatccgtgcccccttttttttgcacatattttgtagttgcatcctatccaaagccattatactgacactgcctaacgaaggaaaccattatgtccttccaatcatgggctcgggaaggttccaagttagtgtaccaggtaacagctacccccagtaagactttcttggaaggaatgtatcagcaatttctcatcttttgcgtatgccccccatcttctgacaatacatctttagatggttctcggggcaagtagtccccttgtacttgtcanagtccaacaccttgaac

SEQ ID NO: 35493 - DNA, 412 bp, Glycine max
tctcacagaagccacgaggaagcttcttgaggaagcctcttaatgaagcatctcaaggaagctacatgtagctgcctcggtaaaaacgctgcccagtctacgttaaccgttggatcttctcataatttggtttgcaacttcacaagatactttaccatgatctgacagttgggatctttgtgaacatttctggagtgtgcgcgacgttttcgttcccgagagcattgctcacttgtgcgttttgagccttgtagaccaagtagcttatgaataatgccatttcttctcctttctttcttccaaaaccattttcagcgttccatgctgtttctccgtcacccatagccaccagtagccaccacaaaccaccattgttcttcgttgaaaccccacaccgagaggaacccttcaa

SEQ ID NO: 35494 - DNA, 407 bp, Glycine max
atcttcttcatgtttgaccccctaacattaagttggagtggacagagatgaagataaagcaattatacatgaccctaaatggagatgatggcggatacaaaactttatcttgactgagattaaggatggagacgaacatgagagtggggaacgacatgcacatctctgccttgtcccgtagtcatgcctattcataataatcacttatatatctttttgttaaataattatagattttgatatgcttaagacaccttttactctgttaattatcttctatcttaatttcattgagtggaatggggatgggaacaacatacccatccctgccttattccgttgtcatgcctattcacaatgatcactaatacattgttttattttaaataattacagactttgattag

SEQ ID NO: 35495 - DNA, 472 bp, Glycine max
ctctagccagatggacttaccttgaattaattcctttgttatctcctatgagcctattttcccctttctttgttttgaagctcattacaagccttaagtgaaaaaccatgatatcaccttacccttaaggaatcttggagctttggaattgttttgggaataagctgggaataagtgtggggggtatgtttcattggaagatatgatttttggccatgcttaatgttttattttggccatgcttgatgtatatatatattgcctagttctttctttaatcttcaattctgtactgttcaataaaaaagaattcagttgctacaaattctgcaatttcgtactcttcatcaaaagaagaagaagaagaataagacgacgactataagtgatgttgaataaataagggcttgatatgagaacttgatttgggagccttggttgatttgttgaattagagggtttgggttactac

SEQ ID NO: 35496 - DNA, 423 bp, Glycine max
  unsure at all n locations
tgcagcatgcaagctctgatggctattcctacttgactttcttttgcctcttctgctattccacgcttanaaagggctcactgacctccctgagcgagtaattgaagtttcgctcagtgccaaacttgcgctaagcctggaaggtgacaaatgactcgctgagcgagctgatgatgcacttagcgcatgcctgcgtgacaaatttccttccaaattcctcctatctgctaagcacgttgatgcctcacttatcggatgacactcgctaaacacattgagctcgcttaacgagacatcaactttatcatttcttcaaaataactcctttttgcttgagattgaagagaaactgacattaatatcatacacaaagcttctactgagcacagataataacaaagccaaatttatttactattctac

SEQ ID NO: 35497 - DNA, 460 bp, Glycine max
gtgaaagagcatggcgtatccatcacatgtggtactaggtttcggtcgggcgatggtgcaagccaactctccacatccacagatcacacataaacccaccatcctcagttgcccaccttcactgagctcacatactcctacgtagcccttagcctcgttcctctcaacactgagtccccatcagatctctccaagcttccacaacatccaagcaattcaacatcccaaacatcatgaactatcataaccattgaaaacagggcagaggcagataactctgcccaacacaaaccaatatcacaacttttctcacttaacaaccccagtaacattctcctcgttccaattcgttaaccgttggatcgactcgaagatattactggaagtctctagcacataagtctacattgtgaccgatgggatctgctatatgacgtccagaacacaatctgtactactc

SEQ ID NO: 35498 - DNA, 342 bp, Glycine max
agcttccctgtggcttctctgagaagctatctcaagaagcttctttgagaagctatatacttatctagccacacccttctattaactaaattaacctgcttgaaaataattgcggatgaaaaataacataacagataatccaacatctaacatagttactaatatatatatatatatatatatcacggcgttacacgcccatgtggtgctatcggaggaacctctaattctcaaaactggtcactatttctctccaataccacaagcttgttccatcaaacgcacggaatcgaattcgcgcgtggtctactattgagcgacctgaatcaagagtatatatat

SEQ ID NO: 35499 - DNA, 345 bp, Glycine max
  unsure at all n locations
ttctcagaatactgatagtgcctccctaaattcaataccaagatcaatgacaccttttaaaccatttttactgaattctgcattgtctctctgcatcatagacacatattcattgttgtctattcagccatcctaaaagggtaaaacatgaaaacaacaacatcataaatctattntaacataaataagagcttatgaaggccacttatgacctatcacctaatacgagcataaaaattctgaatagaaaagaaagcattgtttataatgttggttacttttcaatcataattctcaatctgattagaacaagggttacttctacataattaccgccatcgatgt

SEQ ID NO: 35500 - DNA, 322 bp, Glycine max
  unsure at all n locations
agctntntggaagtgggagatgtagaaaagaatgaatagtgaactgaatggaagggggcacccacacgaaattttgagagttggtcttgggttatgcctttagggttgaaattgggtcggagacaggatgaggatgcgattgcagcttctcttctacgatcctcttcttccttttccattgtctctttgatgttcactttcatctccttgcatatggtttcatcattggctgttatattttggagatcttccctggcttctcttaactacgtagtcatttggtaatcggaatatgcattattgattcttcaatcccccaccc

SEQ ID NO: 35501 - DNA, 400 bp, Glycine max
  unsure at all n locations
tcccaatgaaacactgtattgtacatngactgaatgaaacttgataattatatatgttatagtgacctcttcaatattgttatctatatttattttctcacattctattntatcacgcactaaaaatattgtatcctaaaataataattaacatttttttcatattnttattttctagctttaattgatgtcaatacttttcaccacaggataaatacatatcaatacacatgagtctttaacaagttaaacgatctttatattgacccaagcctaatgtatacaaggataagtttaccaacttttccagcacatgaganaggaagaagaggaatgcttggatcctgaacccattgaagaaaaggtgagagaggctgataacggagagagaaaatgatcc

SEQ ID NO: 35502 - DNA, 429 bp, Glycine max
agcttatatcaaccacgaccaactgtccacgtcaacactagtactggtagaggatctggcccacataaagaaaaattccatagttacttgggggtagtggcgcgggagaaaatccctattgttcatgctacttggaaagatgtccccgaaactttaaaagttattgtatgggatgacattttggtaagtccactcaactggtaacgagtttacttttgtgtatatttaatgcctgtggaaatgtggtttatgcagttactgattgaaaagtatttattattttaggccaaatttgatattcctgaaggtttaactgcgaagaagaaggttatgtccacggttgcaacaagatggaggcaatttaagtcctccctgacctccagatatctatacactgacaaagacgatcaacaaaacattgatccatct

SEQ ID NO: 35503 - DNA, 358 bp, Glycine max
atgatgttcgtgttgaacgcattacatgtagacataccacatgctttatattatgtgcatacagagctacatacatcttggaaacgatacatacggacatttgtgggccatatcatacgccttcatggaatggtcaacaatattctatatcattcataaacgattactccagatgtgcatacttgattgatatacatgagaagtcacaatctctggatgcgttcaaaacattgaaagtcgacgtggaacatcaactcaacctttgaatgcactgtgtcagatctaaccgtggtggtgaatactatgtcagatatgactgttcaggtgaacaacgtccagagcctatcgtcacgtacct

SEQ ID NO: 35504 - DNA, 425 bp, Glycine max
  unsure at all n locations
agctntggagtttccaagtgccaattcgtcttcttctttagtccagtcttcttctggcttcaatccatcagtgggctttccttctgagtccagcatcttgggatgttcccagcctttgatgacagctttccaggttctgctatccagtgatttgaggaaggccaccatccttgctttccagtattcatagttggttccatccagaattggtggtctgttcactggtcctccttctttctccatgttcatcagaatttatctccctaggtctcactcagtgatttcgagtgcccgctctgataccaattgaaattctgataccaatgccagatgtcgtacaggatgtcacgacatcacgcttcagaacaagcagattatctctgagtgtatgaacagattatacaagtaaataacacaagagaatt

SEQ ID NO: 35505 - DNA, 276 bp, Glycine max
  unsure at all n locations
tgcctgtccgatgcagcagtaatgatggcccgagttatgttgtggatctggttactaacccggaatgggtttaggcagagacaacggctgcataactagcctgatanatgccaaaggaaatcgtgggaagtatgtgctatgctataagcccactcacgcagatgtaaagagaatcatcgcgggaaggaacggcggaggtcaaagctcgcgggtgacactagaaagagaaggaagcccgtcctgccacataagtataagctgtattagcgcgagtct

SEQ ID NO: 35506 - DNA, 415 bp, Glycine max
  unsure at all n locations
agcttgtggctgcattcagaggtttccagaatatgtcaagagaagctgatcgaacgtacgtaggctagtagcaacgaaagtgaaaaatcgtgaattaaaatatgataatttcaacgacggtgatgggtataaaccgtagtagtcttgttacaaacaaacacggttcttataaaatcgcctttgtagcattcacatcaaaggcgattttataaaaaccgtcaaacaccttcataaagttgattaaaatttcaaaaatatcacaaaatcgatgtagatttaacgatgtagattgtttattttgtagtagtgtatctagcctataatttgtaatctcggggttattgtgatttgatgaccgcttgtataaaaatactatcttcttttattatattacgaatgttattgncatgtacgt

SEQ ID NO: 35507 - DNA, 436 bp, Glycine max
  unsure at all n locations
ngagagagatctcaagaaccggaggttgcttagggactggatgtatttactggttgttgccgaaccagtataaaattcttgtgttgttcttcttcttccatacactatttaatttccgttgtgtactttacttttatgctatacttttgtttaagttacataacttagtagtaaagcctaattgaatctagtaacattaagaaggatcagttttaattagtcaaggttacttaataattaattcaacccccctattctcaattactccaaggccacttgatccaacacattgtaccctgagcaactgccagatagttcttcttccttttcttttcttttcttaagagctgaatgtaatccatgtacccttatgggtcctctctgatattatgtatgtattcatcttctcacctttatcattagtaattncatttca

SEQ ID NO: 35508 - DNA, 423 bp, Glycine max
agcttgaaggtaaactagatgccttggttaacctggtaacccaactggccatgaataaaaaatctgcacctgtcaccagactctgtggtttatgctcctctgccgaccaccacacagacctttgcccttatgtgcaacaatctgaagcaattgaatagcctgaagcttatgctgcaaacatctacaatagacctcctcaacctcagcagcaaaatcagccacaacagaacaattatgacctctccagcaacaggtacaatcccgggtggaggaatcatcccaaccttagatggtcgaatccttcacaacagcaacaacaacaaccttattttcagaatgttgctagcccaagcagaccatacgttcctccaccaatccaacaacaacaacaacaacaacaacaacagcaacagccctagaaac

SEQ ID NO: 35509 - DNA, 378 bp, Glycine max
  unsure at all n locations
tcttgcgtagccgctctcggtgctcangaaatgccatgaacatatccatcttattactagctactatgaattctttagatcctgaatgtacaaccttcacatgatgctcgctcccctctttgatgtctgcaccatagaaaatcattatcagcgaactcatggatgaagtcctaatgatgccatgtacatgtgcatatctgaacatatagtgtatatattccatccatcatacattgtctggagcttacctggatagactctaacgtcacgcatacccacacccgaatcagaatccatgtaaaagctataccattcaatttctcagagcttcgttgttaatctgagcgctccacatatatgccccgatcggactcctgg

SEQ ID NO: 35510 - DNA, 258 bp, Glycine max
  unsure at all n locations
atcttattttagctanaagagatgttgcataaactgcttggagtctattacattgcgctcgaactatgtttttgcttctatagttaaccagctatatatcagatgcatttataagacatgcgaaacttacatcagtgttgcacatccctgttattatataattcatagacatattctaccaagagtaaaaatgcatataccagcatcaaagttttacatttcataaccttctcatctaatgcttgccatgcctcactg

SEQ ID NO: 35511 - DNA, 379 bp, Glycine max
  unsure at all n locations
cttanaaggcacattggccattggtaatcgattacatcttctgtgtaatcgattaccagagagtaaaactctctaaaaacattntaaattaaatcctttcgccataccttntgttgtttcaacttggaattttcttcctaagactctgggaattatcttgatcatatttcttgaatttcttggatatctaggattcttgtcttgaataaaacttgagaagcgcgttcctttggcatcatcaaaacatcaaaatatctttgcttctacaatgtcttcagtcatttacactttcagaagactacaatgtcttcatttacatttgagagactttcatgtcttcagtatttacgctttaaaagactacatttcttcatatatt

SEQ ID NO: 35512 - DNA, 216 bp, Glycine max
agcttcatgcttaactatgtatggaaaaacttcattactattgttcaagacatacaagtgagcttgtaacaaattgatgcaatcctaccccgcaagggcgatgtgtacaaaactcccagtgtaatggaccatatatgctatataacgccctacgggttttatgagccttatggtatattttaggcgcgtgtgctaagttcaagcccagttatgttt

SEQ ID NO: 35513 - DNA, 416 bp, Glycine max
ggcctgtctgatgcagcagtaatgatggcccgagttatgttgggaaacgattacgaacccggaatgggtttaggcaaagacaacggcggcataactagcttgataaatgccaaaggaaatcgtgggaagtatggtttaggctataaacccactcaggcggatataaagaggagcatcgcagaaagaaagagcggtggtcaaagctcgcggttgaggcaagaaagtgaaggaagcccgccttgccacataagtagaagctttataggcgcaggtctgggaaacgaaggtcaagtggtcgcgatatacgaagatgatgttccgagtacattggatttggtacgaccatgccctcctgatttccagctgggaaattggcgagtggaggaacgccccggcatttacgcaacgagcataat

SEQ ID NO: 35514 - DNA, 399 bp, Glycine max
  unsure at all n locations
agcttgaatggtcattgacccagataactaccgccaaacctgagtcatcaactcaggaatccccaaaaccaacaacaaccaaacagaccgtggctgactatgcctgatcaatacaaactctcttggccctagaagatataggcctcaccaaaataccaaaattggccaaaaagacctgngcagaaatggcctcagaatcagatgatgattctgaaacagatctgcaaaaacaaatccaaaaggccaaatagaccaaagctgtctgcaatcaaaaatcaagccaatcgttgactcaacaagaatcaacaccacaacccaacaacaattatatttcanaaaacaaaattttcaatgttctacaaatggaaccagaatactgtgacaagaatcctttcaaat

SEQ ID NO: 35515 - DNA, 490 bp, Glycine max
tagcctgattcagatcgaattgaagatggcttagcttatccttgtctagcttagctgaccaaatcagcctcagatgcaagggttgggcgctaagcacttgagactcgtggcttagcgcatgatcaaagatgcgcttagcgcgaagctcacgcttagcgaaaggactattgatgtgccattattttctcctatttcttaaccttttttgcaccattttaaataccgattagtcttaattgtcaaatttattacgcagatttattatttgggcccattcagctaattgatgtttttaatctaatttcaggaattaatgaagcattgggcttgaatctagaattgggcttggacttgaagaaggcagactaatttattctacaaaattagagcttatcttatcttatccatatattatttagatgtgatctcatctagatattatgtcatctagatcttatcttatctagagtcgatttgattttacttatgg

SEQ ID NO: 35516 - DNA, 408 bp, Glycine max
agcttggcatgaccacaacatggatgggcattactcgggctatggttgacaggttgtctagggtgagcatgatttatgtctcttcaggtactggaatatcttatgtgagaggtccctggttttaaccattttgacctttttgaccgatagacaacacattcgggatacatgtttcattttactccaagtgagcatatgttatacacgtgtgtcatttgtttacacatgttgcttcacgaaaggacatgtcttaaagacatgttacatggtttgtgggaattacatcatggcacgggttttcagagtgtcatttcagctcccgccagttcctaaaaggttgtggccttctctcctcatttaaaaagactgcatattacgttttctttgtcttcaatcttgaatatttcc

SEQ ID NO: 35517 - DNA, 431 bp, Glycine max
  unsure at all n locations
ntgatgcaacatatggagaggttaatgaaacaacgagatgatgttctccatgagaggctggatcacatggagaatatagatcataatgaagaagacaggagtagaagagggaatgatggtgttcctagacaaaactgaattgatgatattaaactcaacattcctccatttaaaggaaagaatgatccagaggcctacttggagtgggagatgaatatagagcatgttttctcatgcaacaactatgaggaggaacaaaaggtgaagcttgccgtcacggagttttccgactatgttcttgtgtggtggaacaagctacataaggagagagcaagatatgaagagccaatgtgtgatacatggatggagatgaaaaagatcatgatgaagcggtatgtgccggctagttactcaagggacttgaaattcaa

SEQ ID NO: 35518 - DNA, 424 bp, Glycine max
  unsure at all n locations
agctttatatgattggctaagattttgttaaaacataagcacttatacaatgaaggaaagctggagttgctgcacaagatgtccaacgttatgtcaaagaataagatcgggctgcacaatgcacaaggcaagataaagtgtcaaatgaagaattgaagctgcaagattcacgatgtcggatacaatgtccaggacatcctgcccgaaaatactggaattgctaaaagcattgatattgctcgatccacgatgtcggatacaatgtccaggacatcctgcccgaaaatactggagttgctaaaagcattgaagttgcaggatccacaatgtcngatacgatgtccaggacatcttgcccgacaatactggacatataaatctgttatatctttaacagattattgtgcagttagcaagagattag

SEQ ID NO: 35519 - DNA, 289 bp, Glycine max
  unsure at all n locations
tatangaagcatatcattacttatatatagaccatcagaccaattcatgagaagacgatataaacggcacatcttatgatggagactgagataaaacaatataccttgagttcaatggagttcactggaggcggaatgaggaataactgggggggacgcttcattccattcattaagcgataaaggcacacgctagtccgaaattcactaatgttctctcagcggatcataactgagctatacacacgatcactatcattgccgcttattttatcctgaaatcagatct

SEQ ID NO: 35520 - DNA, 264 bp, Glycine max
  unsure at all n locations
aatagctgggaatctatggctaaattacaagaggctttttcgacttatcaccttgaggacaaggtgagtactttatgcgggggtattgattagcataagcataagccacacatcaccaatgtgtacaaccgccaacacccatagggtgcaaaccacccagcaattacaacccacccaaagggtgtaaaccacccaataantatgcttcacccaaagggtgtcaagtcagaagaagtgaatcatggggacatgaccctttggaac

SEQ ID NO: 35521 - DNA, 278 bp, Glycine max
atctctgacttgagtcatcaagagactataaatatgtgaccatggcatgaatttaattaataatttatctttcagtctttcttcatcatgtctcaacatctttgaactcttctctacagaaatttctgagtcatttctctacctctttcttaaagcttttgctcaatactttttctttgaagagaagttctttgatcaaaaacttgtgttattcatctttttcattctcttctcgctttgccacaagaacagaaggactaaccgcctaaattcttttg

SEQ ID NO: 35522 - DNA, 623 bp, Glycine max
  unsure at all n locations
ctcccgctcntgtctatctnactcacatagtgactcnagtcgtagttctgctatcttcctacctcacccacccccacacccgcnnnnttagtgctgcatccttgtactacgngacatatacatactcaagcttgctgcactgagagacgggttcccagaagacagcagtttgtcgttattgctgagaaccctcaccttgcgacaaatgctatggaagaagactaggagatggacataaggaatccgcagtgttgcgagacagcaactgaaaagacgcctctgttcctgacactgatgaagatgttccaacaactgacacccacgacgactctgagcctgatatcaatacagatgatgcatcatcctgcgatccctatgctgaagaactctctgcccccaccgcagagagagcgtcatacgaagatgatcatgcgacgaaggacacccctgcaccagaggcaccataacctgctccaggtgagctcattgacctggaagaaatgaaatctgatgatgaagccctttgcaaccccggttgcacccgtgcgtggcacaacgaatacaaagcctgaaacggagcactcgcatctagaggttggcgaaatatgactatcgccataacg

SEQ ID NO: 35523 - DNA, 426 bp, Glycine max
gcttgttatgaagatgataaaacctatctcttactagatgtcagctagttgtgagtctgtatccataaactcaatgtcacaatcacctttgtgaatatgatccctaatgaaatgatgcttaatatttatacgctctgtcctagaatgcatgatacgattcttagtgatactaatgacactagtgttatcacatcttaaaggaatatgtcctaaatgcaatataaagtcagaaagttattgattaagacacaagatttgtgcacaacaacttcacacaacaatgtactcagccttatctgtaaacaaggcaacacatgctcgattcttactattccatgaaaccaggccattacctaacaagcggcaaatactactagtgcttctcctatctagtgtaaatctggaaaagtttgaatctgagtattc

SEQ ID NO: 35524 - DNA, 390 bp, Glycine max
  unsure at all n locations
agcttattgggtctcatagaatacttggagatcactagtcatcttcactacatgtttcccagaggtgcttctatgaacgtccaggtcttatcctttatcacacatagcatcatggcatcttcttatcttgtctgtgtctgtatgaacttaaagatcctgagggcagacactgtacctgatttcatgtcatcttttcaggagcaaattcaggacctgacacataagaactggtggagaattacctgcagaatagatgctgaatctttgtgcctctctgctctccaagaagatggcatgctccttgatgacaagagccacctctgatctcccccatccagtcaaaatcttccagaanacagaccatcaatatggatttgcagcatgtattgt

SEQ ID NO: 35525 - DNA, 420 bp, Glycine max
taagtgattgtgctagatggtgagggcgctactcttgagagaggctcagcaggagtactctgctacgtggacaatatggaggccacgaacttactaaaaggggagaccctggtgatacgatgagagagccgaaattgacgcgattctccaaatgcatctgttcctttacgttcggtgtagcttgacagatgaacaatgaaggatgctactgtaattaagggctagctggctcgacagaaagttaagcagaaagtgtcatgtgaaagaacacgcacaccctcgtatcattatgcgcccatcatcctgtatttggcgagttactccatcttgcataagccatggcgggaggcaacggacatatggaatgacatccatatgtggtaactacctccagcaggacatacttcgcatatgcgaccg

SEQ ID NO: 35526 - DNA, 386 bp, Glycine max
agcttgacatatttaacatacttaggaactttttttgtgcggtgggaattctctaattgtatcatgtgggccttttgaaagtaacaaacagaaggccagtctgttgcaagtttgctgctgaacatcacattccaccctaagaaaacacaaggtggattgcatcgagggtggataccttaccttagcacagaaggaaaaagtatgtcagtgcaaagtatggactaaactgctttcaggaaaaaagttgtaaaaattgatacaggttggaaaagggaattttccttcccggcttggagtcctcccaatttaaggcagaacccatccactccaatttctgcagtttaaaactttctctacttatttagttgtctcctctgagttcaacc

SEQ ID NO: 35527 - DNA, 387 bp, Glycine max
agcttgcttcttgatgaaatggctataaatgcattaaggatctatatagtattacaacaacaacccaacactgtcgatgcgtactttggaagataggtaacatctcggcattcataaagtctgtcgatctttatttggaaagatttgctccctctccgacttgggtaatgaaagcatgggaaacaactcaagatgaaacgatgactgctggtgtgttggatgctgtggatttcaacacattcggtgtgttcaacttgttcaatcattctaaaaccgaaacctcttgaacctttatgtcttatattgtggcatgctatggtgaaatggttatactataagtttaatctgaaatcacaagatgcaacctacttgtgaagtatcctaatc

SEQ ID NO: 35528 - DNA, 413 bp, Glycine max
  unsure at all n locations
ttcatgacttatttatgagctccttttatcttgtggccagtttcaaatgaacttaaaatgtaacattaaagatatctgataacaggaaaatcctgnggattgacaaatattacaaaggcatcactaacatatcattgactttggaattgcaaagctatctgcaaatcaaagaaaaatatcaatctctatgagtcttctgcacttttttttttttttgagacggagtttcgctcttgcccaggctggagtgcaatggcacgatctcggctcactgcaacctccgccttccgggttcaagcgattgtcctgcctcagcctcccgagtagctgggattacaggtatgtgctaccacacctggctaattntgtatatttagtatagacgcggtttctccatgttggtcatgctggtt

SEQ ID NO: 35529 - DNA, 390 bp, Glycine max
agccttacagaagtaccaaacatttgcactaagcatctgtcgtctgtcaaagatatactagtatgtgcggcgtctatggctttcctttcaaatagattgttgcgctgatttccataatcacaatccatttgcagatccatctcaatttttccaccatccaatgtacaataattacgaacacctcttgaacatgatgaataatctgtctttagaacagataacgagtttgataagttaccctcaccacaaagttccatgttgccttcttcctgtctggattctgaacagcacactctttcctctactacaacacctttactatgatgcttaccagcaatatgcagcaaatgattttcattctcaccagagataacatcaagattcaaatcc

SEQ ID NO: 35530 - DNA, 215 bp, Glycine max
agcttgtcccgttgaccatatatcgcttcctttatgagcccgatactgtggtgacaggataactgtgactacactgagctctcattaaagtcaaagagctgcggaggcaagaaggtaccaaatcatgccgctgtgaccagtgtccgcactaattatactgatcgtgaagtgccgggatcaccaacgcttggcgcgcttatctcaccgatgccttg

SEQ ID NO: 35531 - DNA, 402 bp, Glycine max
caccttctcgctataccaatatgttggctcagcgagcatccgctaagcgcaacggttatgggctaagcgcaacactcatgggctaagcgcgaggaagactctggaagaagatgagatgtacaggttcgctaaacgcaccacttcatctcactaagcacaccgcttcagtccatccgctaagcgagaaaggcacgcgctaagccaaaattcactaatgtacgctaagccggccataattgcgctaagcacatgagcacgaacaaagccacctatttaagccagacatcagattttgtgagggagtttggactgggattcagagctttgcatgtctagagattctagagagagaaaggtccaagctccagagagctcagagagattttgctgtgtgaagatcta

SEQ ID NO: 35532 - DNA, 406 bp, Glycine max
  unsure at all n locations
agcttaagacggatgttaaagtgggtgtgttctgccttcatctagtcacagacaagagaatgccatctgctctgatatcccaaagtaagatggtaggttcccaggcaagtctcaaaaaggtgccaaaatgtatttttgccactcttagatgaccaagcatctcatgtattagaaaagaggaagaaaggtgaggtagtggagagagtatttctttgcagagttgttgaggcactatcagtcttatccctcctcctttaccatgatgagaaggatggggtgtgctctgttgtctcctcagtcctgagagggtttcaaggagactattntaacagcttgacctatgtgagtctgtgggacatatggctgtggccatacccattcttggaaaaaactaaaaataagagac

SEQ ID NO: 35533 - DNA, 307 bp, Glycine max
  unsure at all n locations
ctatactgctcanaatcaccaataacagaatgctcacgatgctcaaaaggtactaaatgatgtctaactaatcaatgaaatgtcctatctatctcacgatcaaacggttgtaagtcacatggatcgcctctacgtatacactatattcatcaatgccaactattcgtcttttatccactcacaatgtaggtttgactacagctaccattgaatgatatccacatgactctgaaattctgcgagaaaccttatcaaatgatgacgaaatagcacacaaaatttcaaaccaaaattcaaagtctaacta

SEQ ID NO: 35534 - DNA, 461 bp, Glycine max
  unsure at all n locations
gcaagcttattggtattataacatatctactatagaatatgaatagatcgacatatatcttcagtgcactaattggtaatgaggttcaacaggaatctccacctacaggtacaattcaatcttcgcgatttttttaaaatgttgtttccaattgttacaatggagttcggaaattcttgccattctagaaatgctactgtactttgagctcaactttaattgtacagatgaaatattaaggatcttactaaaattaatgtattttggctttaaaagatactaaaaagaaaaagtatcaaatgaaggaacacgcacacgctngtataattatgtgcanattatcttgtttttggcaagtaatcgattcttgaaaaagctatgggtagaggcaatggaaatatggaatgatatccatatacttgaacaacatccagcaggaattaatttgccatatgcgatgc

SEQ ID NO: 35535 - DNA, 365 bp, Glycine max
agcttagtctggctggatatgaaattctgggttgaaaattcttttctttaagaatgttgaattttggcccccactctcttctggtttgtaaggtttctgcagagagatccactgttagtctgatgggtttccctttgtgggtaacccaacctttctatctggctgcgcttaatattttttccttcatttcaaccttggtgaatctgatgattatgtgtcttggggttgctcttctcaaggagtatctttgtggcattctctgtatttcctgaatttgaatgttggcctgtgttgctaggttggggaatttctcctggataatatcctgaagagtgttttccagcttgattccattctccctgtca

SEQ ID NO: 35536 - DNA, 396 bp, Glycine max
agcttttaagtatctgtcagggccctaatcatttctgcaacatgaatgaaatggatgaaaattaattttaatattggttttacattaatatggaagctaatgtttgaactagatcagccaaagagtcccagtgcttatctaaaaagcaagtgactaatgtatggagaaattcataattctgtactctacataccctttagcatttatttttccttctggctgtagatttttacaggataatagatgattctgcctgtggaatacctcacctgattccgatttttcacttgaattcatactcctctgactggaaaagaattcttcatttctatggcaaccagggttttgttccctgtcccctccatttaaaattccaagcagataccctttatttca

SEQ ID NO: 35537 - DNA, 546 bp, Glycine max
ctccacccctcctcgcctgttttaggcgtctaccactatacacacgccacggaatgatgatctccgacggacttaataactgagctgcagcagcctgtctatacagcctactgatggtttctattatctcgaggaccggttacgaacccgcgcttagtttatgccaatacaacggcagcatagctagcctgataaattccatacgatatcgcgggaagtatgggttatgctatcagcccactcaggcacatataaagacactcattgccgcaatgatcaatggttgtcatagctcaccgctgacactagaaagcgaacgacacccccctgcccataagtagacactttctcaacgccggtctgggagacgaacgtcaagtggctcgaatatactaagacgatgtcccgagtacattgggcttggtacgaccttgctcttctgatgtccagcagtggaatcgcacactggaggaacgaccccgccatctaagcatcgagcatgatagggacctctcacggtattaacaagctctatcatgcgggccg

SEQ ID NO: 35538 - DNA, 400 bp, Glycine max
  unsure at all n locations
agctttgctggtcttaccttatctccttttggtccataaggtcccagaaggcctgngaaacccctttctcctttcaatcccgataaaccagtagagccagtgaatccttgaggacctgttgggccttgaattccaattggtccaggtcgtccctaaggtggacagaaggagtgcaattagtcaatagaggacttagcattaatacttctcattttcccacgcacaaagagcactgtcataacttcactgaataattttggctaagagatctgtgaggcacgccaaagttccagacacggatcagaaaaggctattttagggattgctaagcttatttggatagaacacattttataagcacatttaataagattcatgtgcaccaagatccttcaacttt

SEQ ID NO: 35539 - DNA, 386 bp, Glycine max
agcttgccacttatgataacgcaggtttgttgttctctttatgtatgatttaaagaaaaatgacctgaataaaaaacagctatctatgtctatacctgtgtctatatttatatggcttcaaacattttatatgaatatgtatttttatatatgtgtgtgaatatgtacatattcatatacttaaaggtaagaaggaagcagaataatacaaaatggatctttccaatcatttgttcatgaaaagtgtaagtatttgcaatctcttcatactcctttaaagtcaaaaatcaatgacaaggaggtagtagagttcggaacagatacaaatcccatttgagtaatagatatacaaaagatgattgagtattgcctactgagttaatgag

SEQ ID NO: 35540 - DNA, 424 bp, Glycine max
ttgagttatcgaagaccaattgctcagtctttcctagctagatgatgaagacgatgcatgtacaatgtttagcatatatatatacatatatatatatatatatatctatatatatatatatatatatatatattacttattctcttgactatgtaactttaccaaacagacacgatctcactgataagacaacagaaattgttgagctcaatatagaagcctttgtcacacacatgacacaaggcttgagaggccatgttgtaatccattcacatatagaacatgatatatttgagttgtgcgctgaatctctatgtctccttctacacattattgttactttatgattgacaacacgagagacatatcctgcatctcttgacaccaagccagagagtatcgacttgcacccttcatgtgcgtt

SEQ ID NO: 35541 - DNA, 392 bp, Glycine max
  unsure at all n locations
agcttgatgaaattcaggatagcacagaaacaattcagaatactgtcagacaaatttacaaagagatttaattaatttttaacaattatgcagacattttttaaatgaaaaacttagttgacatactgcagaatgcatcagagtctcttactggcagaattgatcaagcagaagaatcagtgaacttataaacaggctatttgaaaatacacagaggagacaaaaggaagaaagaataaaaaagaatgaagcatgactacaagatctagaaaatagtcttaacagggcaaatctaggagttattggccttaaaattattggccttattggcctgatgaggtagagagagagagacggnggtagaaagtttattcagaggaatagtaacaaag

SEQ ID NO: 35542 - DNA, 429 bp, Glycine max
  unsure at all n locations
agcttcaggctgttcaattgcttcagattgttgcccagaacggcaaaggtctgtgtgggggtcggcagaggagcataaaccatagagtctggcgacaggtgcatattttttattcatggccagttgggttaccaggttaaccaaggcatctagtttaccttcaaacttcttagtctcacctgatgaagatgaattcgtggctacttcatgcactcttctaatgacaataacatcatttctggcactaaattgctgggagttggaagccatcttctcaattaaatttctggcttcaacaggggtcatgtctccaagggctncaccactggcagcatctatcatacttctctccatgttgttgagtccttcataanaatattggaggagaagctgctctgatatatggtggtgagggcaattagcacataa

SEQ ID NO: 35543 - DNA, 377 bp, Glycine max
  unsure at all n locations
agcatatcatgtttgttttatatcagtctgacactcattctatctttttttagacaaagcattcccaaacaataaagcaggacaccttatggaagttatggaaactttgcgttgtattttgggcagatattaaaagttagttaattacataataaacacataagtatatataaagatgggtaatttactttttttaatatcatgtgaaatggaaaataatggggaaagctattattttttccattcctatctacatgaacttgtccctccctttttcccgcctggaatactgtacagcctgnctgactgcctctaccactttcacctgaagaaatactactagtttaaagcccattcatttcacttaacagtcacct

SEQ ID NO: 35544 - DNA, 447 bp, Glycine max
  unsure at all n locations
aaatttgaattaaaacgtctagaaactgctggtaatcgattaccatatatgtgtaatcgattacacagtgcaaattttgaattcaaattctaatagttgctgtaaattagttctggccactggtaatcgattacatcctctggtaattgattaccacagagtaaatctcttgaaaaagactttttagcttaaatttcttggccaaaccttttgctacttcaattggaattctcttcctacttaatataccctttctaagattctagagactgtcttgattatccatcttgaatatctttgatttctttgtcttgaataaagctttgtgaaacatgtaatcctttggcatcatcaaaacatcaggttgatcctttgtctacaaatcttgaacttattctcttggctctttgcatcatctntgtatcatcaaactccttgaataatctt

SEQ ID NO: 35545 - DNA, 389 bp, Glycine max
agcttccctgtggaatttccctccccatttcagaatacttgcagatgtacattagtaattcactagtccttagttaatatcactttcatgttttcagggtctgagatgcatttcaggaggcagaaatggatctcaggtgcatatggctttgaacatatgattccacttcgattatagtattattacttagacatagtcttgatgtttgcccttgagcatcatttgctaaagatgactattaggttttcctgcatcatccattaagcaacccccaaccccatctagcccagctagcctctcttctacaggaagggagtcagatattctcggccaacaagatgagtaccacactaatgccttcccagtctggcccctagagaatttggtat

SEQ ID NO: 35546 - DNA, 433 bp, Glycine max
agctgatggaataatcatagttgcacaccctatggatactgtttgggaactgaagcctgagatgaagtcatatgatatctctaaattatagaacatcactacaaaggtaatcgctaatatctctgttagcagtagctattaatgccattttttaaaagcacctattaatggcattttaatattttatgcaagagaattccaatccataattggatctgggcttttcgttgctagcgtaaatgacacaaggttattaactatgatgaagtaaggataatcctcgcgatgaataaatattcctaggccacatgtctacataatcatgatttaatgccccacaatgaggacataatgcgagcaaattagctcccacaacatgctctaagacatatacttgccttcatcaaccttcttctcgcctatggctgaaaca

SEQ ID NO: 35547 - DNA, 384 bp, Glycine max
agcttgtctaactgttcctgttttcctataaataaagcaaggatccattttctattataacttgtataagagatgttcaataaatatttgttaatataacactgcataatgtataaatgtgtattttaaaattgtaggttttcaacccattaatgagttgcaatctatatgtatacatgtatgatatgcctggcacattagattttcaataaataattattaaataatggaaacgttcataaaataaattagacacagcaagtagtaagtgctgttgttatctatatccccttactccttgtccctttcaagaaaaaaataccctaaataatgaagagatttcaaatgtgcaactgtattacatggtctacaacaggagttggc

SEQ ID NO: 35548 - DNA, 386 bp, Glycine max
  unsure at all n locations
agcttgttgacacgcggagatntacgtcaactcttgtgctcacaagatttgtcatactgacatttgagtcacgttgacgggcggagataccccagtggttatccggataaacattctattttgctgtctgcacaacgaaaagcctgatagcacgcagagactaacgtcgctttctgcgcccttcgtcaatctgcggacgacaagaccgttgacacgcagagatctacgtcatttgccgcgctcacaagatctgtcatactgacatttgagtcatgctgacggacggaaatacccaagtggatattcgtataaacattcttttctcctgtctgcaacacgagacgcctgatagcacgcagagaccaacgtcgtcttccgcgcccttc

SEQ ID NO: 35549 - DNA, 396 bp, Glycine max
agcttatgtactaattgcctacagttgactggaaaacttaccgataacaacctgtcaattaatacatatttaatgttatatgtattatatactatattcttagaataaagtaagatagagaaaagaaagtgatattttaaaaatcagaaggagtctcaacaatgtctggataattacaaaaagagggaaagaataagaacaaaataaaatcataaggaagaaaaaatatatttgcaattcattaagtggaatggattatcataaaagtcatcatccttgtcatcttcacattgagtaggctgaagaggaggaggaggagaaaggattcatcttgctgtctcaggggtagcagaggtagaaaaggtagaggaggtgaaaggtgaggcaggagaggca

SEQ ID NO: 35550 - DNA, 383 bp, Glycine max
agcttttgggtctcgctgagtttttggctattcacttttctttcttgtgatgcccctgtgcaggtaagaaatgtgtatacctcttctactgtgaatctgcctgttgtcagtttatttcatagacttagttattgagccctcagaggatagagggaaagtcttccctctcatatagaagggaaaaggtagctccgagagtgggagaatatatttataatacatttctctaagagtacttatatccataatttataaacaaattttgaaaattaaaagagagcagtagaataagcaaaacagttgaacaattatatgtttgcatacctatgaaatgcaaatatataaagaaatatatatatctgcaatttatatgaacagaatca

SEQ ID NO: 35551 - DNA, 456 bp, Glycine max
agctcggagaggatgcttcaatggaggaccagatatatggagtgaaagagagaggggggagcacgaacttgaaggaagaaaaggcagagaagttgaactttgagttgtgtctcacaagactctcattcatcaaaggtacaacaagtgttacacatacttctatttatagactaggtagcttccttgagaagctttcttgagaaaacttccttgagaagcttctttgagaaaacttccttgagaagctagagcttagctacacacacccctcttataactaagctcacctccttgagaagctctcttaagaagatctctatagaagctagagtttagcttcacatacctctctaataactaagcttagctccttgagatgagaagctagagcttagctacacaccccctataatagctaagctcacccacatgacataatacatgataatgacaaaa

SEQ ID NO: 35552 - DNA, 390 bp, Glycine max; identical to SEQ ID NO: 35524
  unsure at all n locations

SEQ ID NO: 35553 - DNA, 439 bp, Glycine max
  unsure at all n locations
agcttgaaatgaggaagtgtggaaaggtgagacttcctacttttattcgntgaccacagagtgatacctggagatatgtcgcgggggtcacgagaccttggtgacgtcaggtggggtgctattgcccaaaaccaagcttgaccaatcccgacccaacccgggcatagtcagtcagtgagaacctgtgatgtacctaaacaggcgagctcttggcagtcaaccgattaaagaacaaagaccacagagcatggaggcttatgtggtggctggccagctgtgaatcttgagtgatatatgggatatggcctctggtaatcgattaccaagggtgggtaatcgattacaaggcttataaacgagatcaggaagctaacagggcttatggtaatcgattacaaaggggcgtaatcgattaccaggcttaaaaataggactggaa

SEQ ID NO: 35554 - DNA, 386 bp, Glycine max; identical to SEQ ID NO: 35526

SEQ ID NO: 35555 - DNA, 396 bp, Glycine max
agctctgcaacataagaattaaagaatgtggttgttgggcatctggttccatggctgctgtcgaaggagatggatgatgaatggatgtcctcagttatcgctctctttattaacgccatctgcaagaaaagaatgtagacaattacaaaaatcaagttgaaagcaacataaaggccgctaagtgagatcaaatttgcttagcataccttcacaaaacaacacataccgcttagcgaaacatggttcacttagcgagtcttaaaagagaaaggtatacccgattagcgtcctatagagctcgctatgcctaaaaccagccgcatagatatgcgcttagctctccatgagctgcgcttagcggcactaaataaagtaaattttactaagttatgggag

SEQ ID NO: 35556 - DNA, 413 bp, Glycine max; identical to SEQ ID NO: 35528
  unsure at all n locations

SEQ ID NO: 35557 - DNA, 520 bp, Glycine max
  unsure at all n locations
nttgaattcgtctcgnatgcngngatcctgtatagtctacctgcgcgcatgcaagcttctaaactgtatacataaattaggcactgtttccacttgagagacaagtggcctgatatatgatacgagggggggggcggacctttcatcggacggcgtccgtgataactcttatactcgacgctgatctctctatgaaaatctggaagggcttgaactgaccccgtcacaagcattcattagctgtactatccatcaaatcctacgcagcccagaattacaagcactcttcctatctctctatatctgtctatccatatctctatatatattgacagacagatgatacctcagtgctctctatgatatcataatatcgtcgccgcgacaacaagacatcgctctgtcgaatatcaaagactatctactacgctcccgtattttccacaattcatgaccctattgtcttcaaaccactctatatcgccattcttgttactctcccatccaactatatttatcg

SEQ ID NO: 35558 - DNA, 215 bp, Glycine max; identical to SEQ ID NO: 35530

SEQ ID NO: 35559 - DNA, 420 bp, Glycine max
agcttgcctgtccgatgcagcagtaatgatggcccgagttatgttgtggaacggttacgaacccgaagtgggtttaggcaaagacaacggcggcataactagcctgataaatgccaaaggaaatcgtgggaagtatgggttatgctataagcccactcaggcaaatataaagagaagcatcacgggacagaagagcggtagtcaaagctcgcgatcgagacaagaaggtgaaggaagcccaccctgccacataagtaggagcttaataagcgcgggtctgggggacgaacatcaagtggccgcgatatacgaagatgatgctccgagtacattggatttggtacgaccatgcccttctgatttccagctgggaaattggcgagtggaagaacgccccggcatttacgcgatgagcataat

SEQ ID NO: 35560 - DNA, 406 bp, Glycine max; identical to SEQ ID NO: 35532
  unsure at all n locations

SEQ ID NO: 35561 - DNA, 365 bp, Glycine max; identical to SEQ ID NO: 35535

SEQ ID NO: 35562 - DNA, 404 bp, Glycine max
  unsure at all n locations
agcgttcatcacccttgcatcgactgcattgtgtggcattatccattcagacttacaatggctgcccctcctcatactacgcggaggtgagccaacagctctgatgtatacattcctttatgactatgcaaaaggtagaaaggatttggggcacaaatattcttgccttggactggatnggatctctttatttccttgagtggctcgatatttattagaaggagattgctatctaatcggaccaattttctataccttttgatttttagggcgtgtgattggatagacgggctgctcttcttgctggctattcttggcgcatgctccataatgcaacgattcacacgccttccaagcgaactatatggcctgctaataccaatgctctctatgcagtaggctat

SEQ ID NO: 35563 - DNA, 396 bp, Glycine max; identical to SEQ ID NO: 35536

SEQ ID NO: 35564 - DNA, 400 bp, Glycine max; identical to SEQ ID NO: 35538
  unsure at all n locations

SEQ ID NO: 35565 - DNA, 386 bp, Glycine max; identical to SEQ ID NO: 35539

SEQ ID NO: 35566 - DNA, 423 bp, Glycine max
agctgtgaaccacaccaaaccctgacatgtatcatgtctagccattctacaagcttcgagccagaatactgactcaccacaaaccttgacccacggtgagaatgccactccttaccctcggaagcaaaataaagaagagaaggaaagtttccaatcataggagaaaggagaaggaaaacttccactcaaagaggaagcataaaaggagagaaggagaatttccaatcacaggaagaaagagaggataggaaattcccaatcacagagtgggagagagcataaagaacagaaagaagattcccaatcacagaatgggagatagaataaagagaagtaaagcagaagaaagttcctgatcaaagaaactagaagaaatgtgcagaaagatcttttgaccagatgatatctgaacaatacagaatt

SEQ ID NO: 35567 - DNA, 392 bp, Glycine max; identical to SEQ ID NO: 35541
  unsure at all n locations

SEQ ID NO: 35568 - DNA, 460 bp, Glycine max
  unsure at all n locations
agctggcaagtgaaatcgaattactcgacttaagtacgcaacacaaagaatagtttacactagaatcagaaggtatggtcacaagagtattctatatgaaatatatctcgatacgagtcctcgaactatagagtatcaacattgctaagaacaagaaatcatgaacaaccatactatctatgcaattaaggcaaaacaccatactactaacatacccagaattataaggttcttataataagtatacatcgcacatataagaagtaagaatttaatagttaataaggatgtattaaagaatcacaaacttcaactactacattcatgactacacacaaagtaaagcgagttaagtagtcatgcgtttacacatcaagaaagacatactcatncaagacatatatatggttcacaaggttttcacaacactaatccacacatcaagatagaaatacagtta

SEQ ID NO: 35569 - DNA, 377 bp, Glycine max; identical to SEQ ID NO: 35543
  unsure at all n locations

SEQ ID NO: 35570 - DNA, 447 bp, Glycine max
agctcttcctctggttgctctgctaaggtttccatgtgctagaaagaaagagaagagattgaattctccattccagtgtctgcatgtgatgagtatttatccctccctagatattaagttaacaatcccaatggagaagatgtgcgtaaatgaatcaaaaacttggtatccaaatttcacgaagatccaatggttaaaaagtctcagattgtagttttactaaaacagatttgggtatatgcggaaaaaaggaaagctacgacacggagggaatttctctcagctccgacattgtttctcatattgcaacgatgggaatctttggaaatgagttccagacttggtgctcacatttcacgacgatctaacggttaacgagtttatgatcgtcattttctgagacagagttcagtgtatgcgcgaaaaagatagggtcttgggagagga

SEQ ID NO: 35571 - DNA, 389 bp, Glycine max; identical to SEQ ID NO: 35545

SEQ ID NO: 35572 - DNA, 379 bp, Glycine max
agcttctatggaggctggatctttgagcttcaatgaggctcttcaatggtgattttccaccatggagatgcactggacgataaaggagaagacgtgagagaaggcaccatccactacggaataagcgatggaagaaggagctttgccgccaagaatgtgccttggataagaagcttggagaggatgcttccatggaggaaaagaaagagagagagaaagagagagggggggagtaccaaattgaaggaggaaaaaggggagagaagttgaactttgagtattctctcacaagactctcattcatcaaagttaccatacgtgttaacatacttctatttatagcctacgtagcttccttgagaagctttcttgagaaact

SEQ ID NO: 35573 - DNA, 396 bp, Glycine max; identical to SEQ ID NO: 35549

SEQ ID NO: 35574 - DNA, 384 bp, Glycine max
tctgactcatgacctcagctatcttaagaaggggtgaattaatttcccactaaccaccttttgacccccttctaaatgatacgctccaaatgtagaagtataagcaacaatcaattcaataatgttctttatacatgcgagacaaaatcgactgccataatataaatgagattagggaagagagaaatgctaactcactttatactatttaggacacttcccgtgcctacgtgcaattcctcagcaacccacttgaaattttccactctctttgcaagaatacttttacacagtctgaaccacatagggacaacccatccattgtgtccaggaatacttaccacttaagagaccctccatcccttaatcaatctctttgaataa

SEQ ID NO: 35575 - DNA, 383 bp, Glycine max; identical to SEQ ID NO: 35550

SEQ ID NO: 35576 - DNA, 556 bp, Glycine max
  unsure at all n locations
cctccccccccctccgttctttatttacattccacccacccctttcaacaaccccanccaatgattcgttacntccggatcggatattaatgggctgcgctccacttgaacaagatattgactcaagttacacgtgcaaagaagagaacacactgcattcaggctgcatggtccagactatatgctacatgaactatctatctatacgattgccttttactatatagaggcaacattgctattaacatgacttccagaccttccgttctatctatgcaaataaggctatgcaccatactactgacatacacggaatattaaagttgcataatgatgtatcattcaacatatgcgaatgcaaacgtctatggactataatggtgtatcaaagaatcaccnacgtttactactatattcatgactacacgcacagcatagtgatttttacagatatgcgcttacgcctccttatatcatgctcctacaagaaatatatctgggataaactgacatatgactactctcctgacaagaagagagtagatgattgattacg

SEQ ID NO: 35577 - DNA, 390 bp, Glycine max; identical to SEQ ID NO: 35524
  unsure at all n locations

SEQ ID NO: 35578 - DNA, 386 bp, Glycine max; identical to SEQ ID NO: 35526

SEQ ID NO: 35579 - DNA, 413 bp, Glycine max; identical to SEQ ID NO: 35528
  unsure at all n locations

SEQ ID NO: 35580 - DNA, 215 bp, Glycine max; identical to SEQ ID NO: 35530

SEQ ID NO: 35581 - DNA, 397 bp, Glycine max
  unsure at all n locations
agctntacatggagctacatcatgtggtatcagagcatcttcatctaggtgatgctcttttgcttcctctatcttttgttcagctaattcactttgattccttgctcttcatcatcttctccatgtatctcctccattatcttgtgattcggtattgtctagagtagattcaaaaaaataaactgactaaatcttagatttacacttgttcatgcattctctatggttcaaattttatagatctactcttgaatcatgcttttgcgtctgattctacgttctatcttttttcagaaataatcttcttgtgctgagcctttagatatcaactttcttaccaaatattgattacaaaagaaaacaccaaaatctaagtgcaaaccatttgattcatgtt

SEQ ID NO: 35582 - DNA, 406 bp, Glycine max; identical to SEQ ID NO: 35532
  unsure at all n locations

SEQ ID NO: 35583 - DNA, 294 bp, Glycine max
agcttgaatttgaacaacagaagctcttgagatattctaatggtcataacttatcacacggaagtccgattcatgcgcataatatatcgagaccctcgaaattgcactacggaagctctcacgaaacataaatggcgataacttttcacacggatgtgcattcaagtgcataatatatagagaagcttgacagtgaacaatggaagctctctagaaatatcaatggacataacttatcagacggaagacgcattctggcgcacattatatcgagacgctagcaattgcacaaag

SEQ ID NO: 35584 - DNA, 376 bp, Glycine max
atcttaagtcactgggctgcagcttaaccaggggagatggaccatttcaagttcttgactgaatcaatgaccatgcttacacagttgagctgcccggagagtataatgtcatctccaccttcgatgtctctgatctatctctattctatgcaaatggacaatcctatttgaagatcaactcttctaaagagggagagaatgatgatgacatgaccaatagcaatggacaagatccacttgaaagacttggaggacctattgatgaggacatgaccaagatctatggcaatgatccacttgtacgacttggacgacctattacatcgtctatagcaaggaaagccaatgaagctcttcaacacatgcatgacatact

SEQ ID NO: 35585 - DNA, 365 bp, Glycine max; identical to SEQ ID NO: 35535

SEQ ID NO: 35586 - DNA, 449 bp, Glycine max
gctgtaagacattatgcaacattgttttggatattcaacatgaacatcccatttcttgacgttggtaccttcgcgattagattgcttctcctatctctgatggaaagactggaatctttcattgaatatcatagcctttattgagtaattgacccaaactcataatattattcttcatatttgggacatagtagacatttgatatgaattcatgtcttccatctttcaaataaattaagatcttacattatccttttacaagaatcttagaattatcaccaaatgagacattgtcacttactgattcatcaagatccacgaacatgcttcttttctacacatatggttgcttgcaccagtgtcaacgtatcatgtgttgtcttggctaccttcattacatgcacatgctagaagcactatttcaaacttcttggctttttgctccacat

SEQ ID NO: 35587 - DNA, 396 bp, Glycine max; identical to SEQ ID NO: 35536

SEQ ID NO: 35588 - DNA, 398 bp, Glycine max
  unsure at all n locations
agcttgttaacgagataaaattatgattacgaccaatcaaccactctcatacatcgccaactcgaaactcgataatctatctgtattgctattntataatagagctcccacataagagagacagaaagacataaactagtctcttttgaaaaaaaaaccaagaaagaaaagagaaactgacaaaaataattagctttggagttggtacagaattcttccaagttaactagaaactttgaattcaaaaccagtacatacaattaatatgccggtggtacaagcagatgattgaattctttaagtaagcttctatgtttgaatcttataaataaaaaaaatatgtttaaaatgaaaaattctataaacaaagatttcttaatggacattaattattaaca

SEQ ID NO: 35589 - DNA, 400 bp, Glycine max; identical to SEQ ID NO: 35538
  unsure at all n locations

SEQ ID NO: 35590 - DNA, 298 bp, Glycine max
agcccttgaggacaggattgctactttgtcagcaataataacggccaacagtgaagcttttgatgaaattgtttctaatcttaaagagcgtgtgaacaatgtcacgactggcatacaaactataagctggaaagtttctgatgactgtaaaaatttcgaggacagtatctctaacatctcacacgagctatgggttgcaaacgaccatgtgagggagatgaatacggaaaaagagcagctaatgagagacaaaaaccacttggtggagcagctgcagattaaaaaagaacacgaagtg

SEQ ID NO: 35591 - DNA, 386 bp, Glycine max; identical to SEQ ID NO: 35539

SEQ ID NO: 35592 - DNA, 259 bp, Glycine max
acctcttcctttacatgaccattaacgaatttggtgctcacattcatttgctggaactcacagacaaaatgagctactaatgccctaactacgtggacagaatctttcttagatgtaggagaaaaagactctgtgtaaactcatacttctatttgagtgaaccctttggcatcaaacgctgccttaagtcacgcaatgaagccttgcgagtctttattggttataaaacgcatctacatccaatggctattacaccact

SEQ ID NO: 35593 - DNA, 392 bp, Glycine max; identical to SEQ ID NO: 35541
  unsure at all n locations

SEQ ID NO: 35594 - DNA, 437 bp, Glycine max
  unsure at all n locations
agctatgcaagatggcttcatcttcaagcttagttctctctcaggctatccacagccaagaacactaaaaaaaaactcaactccccctcagaaatcgtgatttcatcttaaatagacaatcctgtcggtgggcgcgcacttagcggaagatgagctcgcttagcgcgcgttagtgacttctggcttagcgctagtcacactcgctcaacttggaggtgaagacaatgcgcttagcgagttgtgcttgttcagcacctctatacagctcatccttcttccaaaattgtccgcgcgcttagccattatatggtgcgcttagcggatgacgcgcttagccaaatgatgagtggcttagtgagttcatgacatctgcactccaccaatcttgcctatnttacctgagattgaagtggaatgatcattaaatacacaaaact

SEQ ID NO: 35595 - DNA, 377 bp, Glycine max; identical to SEQ ID NO: 35543
  unsure at all n locations

SEQ ID NO: 35596 - DNA, 677 bp, Glycine max
  unsure at all n locations
ctcccactctctcacacttctaantggttactagtgatgttcttctcagaccctgttgacactccanctccaccacagcaccacacncaccncaggnattttganatcgaatttcccttctcaganaccccgcgatacgtntagcataagagnatcgcacgcctgctaagcatntgtatgagagagtaatgatgatggacgatgtgatgaatagtagacatacacatcacacaagatgtgtggcgcactcattactgagagtcatgatacgtcttgaagctgatnatctcgcatagagatgagtcaatgagatataatntacatgcgacatcatcatgagccctcttatatgatagcactagagcgcccgcacaaacatacgtatggaaacatagaatggctattcaaataccacttgaatgagtggaggccaatcatggagccaaaatttcactaattatgattagtctattataactatggttcaacccactaatcctagaacaaggccatgatacttcactaagagagcttaggacgtgcgacgcatgtacagctttagatacatgcaccacaggtgacgtattgagtgtgtactgcggtagatcaagtacatgctcatgctacacgtcttaatattaaatggattgcgcttctctcaatacaattcatctacn

SEQ ID NO: 35597 - DNA, 389 bp, Glycine max; identical to SEQ ID NO: 35545

SEQ ID NO: 35598 - DNA, 229 bp, Glycine max
acctcacatacacaaacaaacgaggagaaacattattacgagctcctatacatatattctacaacaccttttcacaagtcaagatctctctgtatatctcttcatgacgtcgctcatgacatcctcacacctatctccttctcatctccttgacgaacacagccatctgaatacaatccctcctacacaagttgatgataatcacacaacttacacatttctcacatgg

SEQ ID NO: 35599 - DNA, 384 bp, Glycine max; identical to SEQ ID NO: 35547

SEQ ID NO: 35600 - DNA, 399 bp, Glycine max
agctattgataatatcttacgtgtcataagagagtcaaaagtcctaattacaattcctatcacatacctgtccaaagcaccacaatgttgtctttggttaaactcttgaaatttgaaaataaatattttataacaaatgctaacttgtgctctaagaacattagttgaggaatttaaagtagaaattatttttactagaaaacgaaaaattatgttcccattatcttattacgcttttatgatttaggcaataaatatttttctcttttaattctttaatcaatgtcttaagtacattacttatcaatacctatattctatttatgctctagacagtattcattgtattcgacaaatactttttttaattttaaataaaatgtgtggggatgttagttt

SEQ ID NO: 35601 - DNA, 396 bp, Glycine max; identical to SEQ ID NO: 35549

SEQ ID NO: 35602 - DNA, 425 bp, Glycine max
  unsure at all n locations
taacaccttggttctacctcgtgatgacctcgaacatgagaaccattctacggatccacaatcaccagaagtataactattcctgtgcactgatcctgtanaataaaattggttgtgaagaccaacactgctgaactagaatgcgatcacgccacctgctgattatatggaagttcagactctgggcctgccatcactattagatcaagcacatccatcattgaggttatgctatgactattgaaacccgatcaccttttgctcgtctacaattacatatgactcgctgctattgcaccatgcctgcgtagcgctcgactacaggcctcttggcataatgtatgatactgcttaacgaacagcttccgtcatgaccatactggagtgggctcggctaagtcacatacttaccgagcttatatccn

SEQ ID NO: 35603 - DNA, 450 bp, Glycine max
agcttcaaccaattaacattgtttgaatgacaactgttgtagttggacaacaatcacatagtttgtccaccatggtatgctttatgttcctattggttatagctctggtatgctttatgttcctattggttatagctttggtgctagaatgttcaatttggagtccacaagaggaggatctccatatggtgctggagtttttgctggagatggtacaagacaagcaagtgaaatggagctggagcttgtagagtatcatggcaagtatatatgaaattagcccataaaagctagattgaattctgcgattataaattcattaagccctcctagccaggtcagcattctagtctgtcccaagttggtgacctctaaatcaaacttcttaatgcactcaaacaaaccattggtgacctcacaatcaaacttcaagtcagtgttgtcataaaa

SEQ ID NO: 35604 - DNA, 390 bp, Glycine max; identical to SEQ ID NO: 35524
  unsure at all n locations

SEQ ID NO: 35605 - DNA, 431 bp, Glycine max
  unsure at all n locations
agcttncatcagaggcggcgggcccgatgacatgctggaaccatntggtcccgcactttntaaataattctgctatctataagactcagggtccgatgacatgcggcaaccacttggtcccacacctttttgctatgtataagactcaaagcatgatagaacgcagagactaatgtcgtcttctgtgtctttccccatccagaggcgacggtcccgatgacatgcgggaaccatttggtcccgcacttgcttttgctatctataatactcaaagcatgagagcacgcagagattaacgccgtcttctgcgccttttgtcatccagaggcggctggcccgatgacatgctggaaccatttggtcccacacctttttgctatctataagactcanagcatgatagcacgcatagacgaacgctcgcttctacg

SEQ ID NO: 35606 - DNA, 386 bp, Glycine max; identical to SEQ ID NO: 35526

SEQ ID NO: 35607 - DNA, 625 bp, Glycine max
  unsure at all n locations
cactccacccagtcaactcnctcatacgtatangataaggtgttatgtctanatactgcttatacacnnntatccaacacgcccgcccgcaccncaactttggagatcgtagttggacngcgtatcctatanagcggatctgtatgcatgcaagctgtgggcatgttagcgtntgtgggaanactgtatctgtattcactgtagctctcgaatgcacaatcgagatggttcaagcacaaatatatatatgttgttgtcggcttgccacgcataaatagtttttatctgttcagattaagcatacacttgctcatgcgacgacttcacatactcaactatatcgcgtgcatgcttatgcttaatcataggaatggtacgaatatgcgactaatattgaggagcgagtagacttaatccttattctaggtcatatggtgagacaaaaattgcgctaagtgattgcgcgattataatcaaactcgacatgaggctaacaggtttctccaagacttaacatttcactttgaaactgatctaagcagtgagcctaatgccctatagactacttcacgttgaacattacttggtgggtgacagtagtgcacatacacactcacttccattt

SEQ ID NO: 35608 - DNA, 413 bp, Glycine max; identical to SEQ ID NO: 35528
  unsure at all n locations

SEQ ID NO: 35609 - DNA, 311 bp, Glycine max
gatgtaaatacatgtatatctatttaatgatgttttatgtgttccctatgctatcagtacgtcattgcagtgcgcttttgccttgatcacgtatatgcatgctttgctaagatccttcacgtagatgcatgctgtgctaagatcgtactatcaattcaacaaagaccacggtggacctttcaacaggccgcttaacaacggcctatcatcttttacaggacaaccaagctggaggagactttgactcaattcatgcaggtgaccatgtcaaatcacacaagcactgagtcaacaatgaagaaccttgagat

SEQ ID NO: 35610 - DNA, 215 bp, Glycine max; identical to SEQ ID NO: 35530

SEQ ID NO: 35611 - DNA, 577 bp, Glycine max
  unsure at all n locations
ccacctcccccccagctttaactccagcaatacaagagttttggcgcgtacacattacactcaccacgcgcngcccgcttggtatcgtcgcantnncgagacctncanactcactgcagcacgcaagcttcanctgacttccagtaaatctcttcaactataatgccttactgccatccagtattaggacatatccaagtaaagaaaggaacacaatctcgcccgacggcctcaaagggcatacgcggcgcactcttcctacactcaaactacgttcgagttaacaacaggcattgataaacaggttgaatatagattgatatatctattatgactattacacagacatattattcctacataccattccaagaagaaagtgaaacgggtgagaaagatggtagctactgcctgtctatagaatacaaacatgacattgctcatgccatgatcgaatcgccctcttgagagaatgaacatatcagcatatatggctcgccccagaaccacaatcacaaacggtcgatcctatcattttgactaccctggcctcaatgcgactaacatcgtcgcatcg

SEQ ID NO: 35612 - DNA, 406 bp, Glycine max; identical to SEQ ID NO: 35532
  unsure at all n locations

SEQ ID NO: 35613 - DNA, 365 bp, Glycine max; identical to SEQ ID NO: 35535

SEQ ID NO: 35614 - DNA, 604 bp, Glycine max
  unsure at all n locations
cctcctcaccgccgcatgcgcttattggatttgcacgctgattcggctagccacannntatatnaaaaannacaaacgcgaccaccacgagctttggaatcgtagacactctcgancccgcngatcatctacatacgactgcangcatgctagcttgtactcttgcgcagcacatcatgtacctttcctgaccgtgttgatggtgatatgcacacgcacagtacacatacctctggaatttcctgacgatagagtaggcacttttcttcacaccacttctgacatcacataactaagtccacgtctcggctacgacctctttattgtgccctcctgatgagatgctgttcttcagagaggaagagcagacatcgatgccaactgcccagcctgtgaaacgcgtatctgcagtgaccttgtgtgatcctgagtcgaactacaaggcggacatacatattgctgactctcgtgactctcacggcgagagtgtaccatcgatgtaacgtgctgtgaggcctcggaacgtaaggttctcgctctttgtgcctaatgagagccgttatctccatagagcgttgcatcgttcgactgcatatattcaccg

SEQ ID NO: 35615 - DNA, 396 bp, Glycine max; identical to SEQ ID NO: 35536

SEQ ID NO: 35616 - DNA, 610 bp, Glycine max
  unsure at all n locations
ccgacctctccacgtcctctctaactantcanatagatagtanantagcgaaagtgatatactctatcagatatacacaccatcacaccacaacgacaccgcnatttgaattgtagatcgtctcgttacctgcgatacntacagcgacctgccagctgcaagctatggagaatccaagagccaatgctggttcttacttactcgcacctgattctggctccaatctctcagtgggcttatcttctgcgcgcagcatcttgggatgttcccagcctttgatgacagctctccaggatctgctatacacagagttgaggaaggcccacattcgtgcattccagtattcataggagggtccatccaaaataggaggcacgagcactggccctccttccttctgcatgttcatgagaatatatcttcctagatgtcactcagtgagtatgagcgcctgccctgataccaactgaacatcctgtaccggcgacaaacgtcgacacgatgtcacgacatctcgcactaagcatgccaactgtccatgactgtatgaacagattcaccaataaattacacgcgacaatcgtaacacccctcggtgcacctcacctcg

SEQ ID NO: 35617 - DNA, 400 bp, Glycine max; identical to SEQ ID NO: 35538
  unsure at all n locations

SEQ ID NO: 35618 - DNA, 621 bp, Glycine max
  unsure at all n locations
ccactcgcactcacaccacataantacattanttcgctctaaatggcgactgccactgcgtactcgccttncnacctcntcatccgccgcgcgnaccancncttggaatttggagactgttatccnttgccgggatccgngatancntacagcagacctgcaagcttgcagcgctcctggacatacttgatggactatcgcgctcgacagaacgacctatgacaatgggagagggggctagacgcactgctctcatagctcagcctaacgcatagagaaacttactttagaagatacataaagaaggtaggaccacatctacacatacctctctaatagctaaggatagctcccttggatgagaacctacagcttacctacacaccacgtataacacttaatctcacacctatgaccaaagacatgaaaatcaagaatgggggccttattacacagacgcctcagaacgctccgaactacatcgctgataccctaccatactagaacggccattatacatggcccatacgaaggaggtgcctgacctagtgtttacaaacatcagcgggctcatacatagcccatgggctccataactactcctaagctcatgagaaccct

SEQ ID NO: 35619 - DNA, 386 bp, Glycine max; identical to SEQ ID NO: 35539

SEQ ID NO: 35620 - DNA, 438 bp, Glycine max
agcttgttaccttattgacatttaaattaatactagctagtaaagggtgaaattaatcatttcttcacaagagtgtgcaaagatgttcgaatcacctgtggtggaccaccgacatcatttgtgcaatagagcctggcatcatcaacaagtttgcaaaatcttggaaatgcattagcaaatcttttgtgagatttcaactgtgaattcacccttactgccctacctgtcataatagctctcctcgtaaaattccaatggcaagatgttaacctgtcatatatatatatataaaaccaattcccaaactagcaacacggatgattccacaaagcatttatacctaatgcctctaacaacagcaagatagccatcacaaaccacaccaactagctcaattctgtaggctttcgcgtgcgcgatctcattacaattttctct

SEQ ID NO: 35621 - DNA, 392 bp, Glycine max; identical to SEQ ID NO: 35541
  unsure at all n locations

SEQ ID NO: 35622 - DNA, 411 bp, Glycine max
  unsure at all n locations
agctnttaactaaattagcaacgctcaaattgattnttaaatggtataatcgattacaatatattggtaatcgattaccagtgtatctgaatgttaaaattcaaattcaattgtgaagagtcatatcctttcataaaatgctttgtgtaatcgattacatggttatggtaatcgattaccagtgacaagttttgaataaaaagtcaagagatgtaactcatccaatggttttcaggtttttctcaaggatataactcttccaatggtttgcttgaccagacatgaagagtctataaaagcaagaccttgacttgcatttcaataactgtttagaaaaacttttagaatttcttgaacaactnttgagagattgtgaaacctttgcttcttatctttcttcttcttcctttg

SEQ ID NO: 35623 - DNA, 377 bp, Glycine max; identical to SEQ ID NO: 35543
  unsure at all n locations

SEQ ID NO: 35624 - DNA, 464 bp, Glycine max
agcttcccaagtatttaagttcttcctcaaaactatcctaagcaaagttcccaatgtcctattaacaacttccatttgcccatcggtttgtgggtgacaagtagttgaaaataacaatctactgcccaacttgccccacaaagtcctccaaaaatggcttaggaacttagagtccctatcactaacaatgctccttggcaaaccatggagtctcacaatctccttgaaaaacaaatcagccacatgggaagcatcatcaacttttttacatggaataaaatgagccattttagataacctatcaacaaccacaaaaatggaatctctaccactgcttgtttttggcagccccaaaacaaaatacatggataaatcaatccaaggatactccggaattggcaatggagtatacaatgcatgacgctgtaccttagactctgcccttttacatacaatgcaatgtt

SEQ ID NO: 35625 - DNA, 389 bp, Glycine max; identical to SEQ ID NO: 35545

SEQ ID NO: 35626 - DNA, 465 bp, Glycine max
  unsure at all n locations
acctgcggcatgcaagcttccagatatggaaagctaaatcctctgttggttctttcttgtaggtacttgatgtaaatacatgtatatctatttaatgatattttatgtattctctatgctatcactacgccatttcaatgcgcttttgccttgatcacatagatgcatgctttgttaggatcattcaacagtggaaactggtctgattcttagaacttgataggatagggctagtttatcgcattatcacgaggtatcgcggtacggcaacctagttgttcgtatgctgacttaatgcggttctggtcgagttcactccaacacgatgaatctgaggacaatgcttgattangattangctagactctcatgacgaatcggggtctagcattttacgagacaccatacaacacatgagcattgttaagtagagaatatccttataacatcatgcacctactatga

SEQ ID NO: 35627 - DNA, 384 bp, Glycine max; identical to SEQ ID NO: 35547

SEQ ID NO: 35628 - DNA, 227 bp, Glycine max
gcttattccttatctagagtagctgagcacaacatcttactactgacatgtaatggactttaggagtggacaatggagttgagccttgcatcttgcatagtcatgttactaagttagccccgataaaggaatagcttccactaaagctggctctttgtactctatcaccaacatagtgaacatgctaatagccgggaagtctgaaactttctcttttgttgaacata

SEQ ID NO: 35629 - DNA, 396 bp, Glycine max; identical to SEQ ID NO: 35549

SEQ ID NO: 35630 - DNA, 569 bp, Glycine max
  unsure at all n locations
ccccctccccactcaatctaagctttcgttttcattgtctacatccaacaccccccacccccccgaattgaatcgttacttcgcgaccttaagnnactgncagctgcaagctctaactctactccatttcatttcctcgcattgacacttaaccgctccacaccgaatccaatgtatgcatggcaatgacttttgagcacatcgccgtttcgtgatgataatggcgttaccttttgatcgacgagtgctattgacaagcttcaactcgcaacttgctctgacgctgtctatgcgctcgtatctattctgtatattgtctggagctgctcgaatgatgcattgcgctatcgaaatatataaaatgctgatacttggataaagggatggactaatatgcacattggtccttcatcattcaccgcctggacttgtaccaaagagtacagatcccctctcactccaatcctacggactaaaactacatcttgctgtgcgaacttgccatagcaaacaacgatgccctcacgaaaccactcatatctctacctgcacttcaatatctccaccct

SEQ ID NO: 35631 - DNA, 383 bp, Glycine max; identical to SEQ ID NO: 35550

SEQ ID NO: 35632 - DNA, 436 bp, Glycine max
agctctatatcgatggtgtcgttctgagagatgattagcataaaggggtaatggaaaatctcttagttggcaaggtgatgaaacaagtcctgagtgctggggagagtttgctgaagtatgagatccctgcggttataaaaggtatgctagtgaagcaaatgcaacacaacctttgaattcgccaaaaacaacatccattcacttgttcctttttgtatggttccagaggataaattttgttggttgcgggacaatgaatttgcaagacagaccttagctggggtcaatccagtgaatattgagctgtcgaaggtagtttttcatacctgtataggaagaaattattgtgtggtactgctcatagctccgtcaatttccacgtaacacgccaccaaactcatcaatttacgacaaattaattatgtattacgtggag

SEQ ID NO: 35633 - DNA, 390 bp, Glycine max; identical to SEQ ID NO: 35524
  unsure at all n locations

SEQ ID NO: 35634 - DNA, 434 bp, Glycine max
cgcttgaaggtctgtaacccaccatcttctcatagtagaacaccggcaacgtgtctactatcattgctatcatctccttttacatcattgcgggcgccacttgagctgacagatccctccacctttggacgtattctttgaaagattcatgccccttttcacccatgttttgtagctgcatcctatccggagccatatcagaattgtactgataccgtctaacgaaggcaaccactaggtccttccaagaatggactcacgaaggttgcaaattattatactaggtgacggctgccccagtacgactttcctggaagatatgcattgagtagttttgatcttttgcgtacgcctccatctttcgacagtacattgtcaagtgattcttatggcaattagcactcttgtacttatcgaaattcgtgaccttgaac

SEQ ID NO: 35635 - DNA, 386 bp, Glycine max; identical to SEQ ID NO: 35526

SEQ ID NO: 35636 - DNA, 251 bp, Glycine max
cctgacatttcacacatacatatcaaacgttacaagacaactatatctgctcgattgaatacctcacccactcgagtgtatcacacaattatggctattctctaatgaaacactctcgccttttaccactctaattccccttgagttcttacgcaattcaagagattatgtgcacaacatagaacaattcatcaatatgcgtgaagcaacgctagacaatgaaaacgttaacccagaaaaaggctaacaat

SEQ ID NO: 35637 - DNA, 413 bp, Glycine max; identical to SEQ ID NO: 35528
  unsure at all n locations

SEQ ID NO: 35638 - DNA, 449 bp, Glycine max
agcttcccacaatgtggatcatcctccagactctgtgtgtcaagggctaccctccaaacctctccatcatgccagacaacagcatctatgacaggccctttatcatcatagctctacaacataaaacagcatttccttttcaatgtaaggaattcaagttgaaaaaactctcagtgggagcacaaacacaagtataaatgtctctttcagttcgagtcattgagacgagtcagagggagaaaacacaagaaattcattgtttatgtgtggccagatggaaaagaaaattcaacattatttcatacagagacaatcattctatcaacatcctcattccaccacttatgagtgtcctataatgatataaatgcacatcaattggtcattacctatttcaaggacaggaaaagacacacatacccgaagagcaacctatgaagatgacatgc

SEQ ID NO: 35639 - DNA, 215 bp, Glycine max; identical to SEQ ID NO: 35530

SEQ ID NO: 35640 - DNA, 262 bp, Glycine max
gcttctcaaatcgctaatatatggtttgcatctcctctgatatggacaactccgcctcacataacccttgatctgaataactgagcctacaccaatgtcagacgctaatttcatccgggtataatgctcgtatcattcagatatgatggtatgatcactgctaatcgaattaccgtgtttggcatcggttacagtgcacaaccaacgggtatcgcggtgctttgatagttgtttgtcattttcagaaacataagcctccatg

SEQ ID NO: 35641 - DNA, 406 bp, Glycine max; identical to SEQ ID NO: 35532
  unsure at all n locations

SEQ ID NO: 35642 - DNA, 274 bp, Glycine max
agctcataatatatcgatacgctcgaaattaaacatcgaatactctctggaaattcaaatggtcataactttctacacggatgtccgactgcagctaatcacatatcgattcgctcacaactgaacaacggaagctcttgagaaattcaaacggtcctatctttacgcacggatgttagattaaggcgcatcatatataacgacgctcgaatttgaacaacggtagctctcgagaaactcagattgacatcacttttcacactgatgtccaatt

SEQ ID NO: 35643 - DNA, 593 bp, Glycine max
  unsure at all n locations
nacctgtgtcanccccctcccgcactcgctaggtaaactcgtgggcagnttctacgacaccccccaaccacgcgacnccaccttcgaatttgatttgtacaccgttctcgncaccgggatatatacatcgactggagcatgcgagcttgaagaagaaataagctacctctctttaatctatgcttaataatagtagtacagcagcttatagcacgacggtatcttacgaagttttgtgtgggaatgatagccgacgtcccaagtacgcagcatgtacgttctttgtgtacagtacggctgtagcaatgctacaggcgaacatcaattggaaaacagtgatatttacctgaatgtggtctctattggattcctacccccatgtatgagagagagaaggagtctgttggtaatgtgcatgtatgagaaacgtgcncaggtatttatgcttctctgctcgagagttctatcactacgtacggaactaagtagaatggttcgatgttgaaccctatgcccatctcaatcattcatttattttatcagatcataactaacatggatagatcttaattggtttcaataccattgcaccg

SEQ ID NO: 35644 - DNA, 365 bp, Glycine max; identical to SEQ ID NO: 35535

SEQ ID NO: 35645 - DNA, 586 bp, Glycine max
  unsure at all n locations
ccccaccctccacccctccgaattgaacgtatgtgttgtcactgctccacaacccaancaacaccaagacacaccctgacttcgaatcgtagccctaccganaccgtgacatcnacatcgactgtggactgtatattatacgcaatctctacaccataactgatattctccgaacaccaacgagaatgcttacataatcgtctgtcttgctcacctaacgcgagataaaccactgacatgaaacatcgaacctataccacggagacagcctaataccctccgaatacagagtcgacactcttcacatactagggtcgcatcgttgcacacaggagcaccgcgcatcgcaccacatacgcctcatgaccaaacagatacccaagcgtctctaacaatatcgctagcaacaaaggcgaccgtcacggagcataaagaatatccgaacaatctttcctacccactgagagcaaccctgcctgaccattgcatgcctttactgaacccatacaaatccatcgcccaacgcgccaaaagaactcgatggaccacattatcgaaatgaacacccacatccaatcaacaaacg

SEQ ID NO: 35646 - DNA, 396 bp, Glycine max; identical to SEQ ID NO: 35536

SEQ ID NO: 35647 - DNA, 400 bp, Glycine max; identical to SEQ ID NO: 35538
  unsure at all n locations

SEQ ID NO: 35648 - DNA, 448 bp, Glycine max
agcttgtacttgagctataagctctggcctttatgttgttcatcatgtttctcatgttgctctgcctatctctaacatattttcataaattctacatgctaccctatattttcacacctaacaaactcatttttaaagtcaaatctttaacacaaccagtccatgcaaccatagcagccaatttattttcgtgacaatttagtccaaaaagaaaaattccttaaacttgttgtgttcataacttttattagaaagcttcaatttatgtgaaatttaaggctaaccctacagtttgacacccaaggaactcattttttaccttacaatttcaaaataaataacaacatatctacagtttcagtcagggtagtagctacgaattttgaacatcaaaacaacattcaatgaaacttagctctcaaagacaacaagaatagggttcaagaat

SEQ ID NO: 35649 - DNA, 386 bp, Glycine max; identical to SEQ ID NO: 35539

SEQ ID NO: 35650 - DNA, 449 bp, Glycine max
  unsure at all n locations
agctctcaacaagagtcttcacaaataactatcatgaagcagataactagcaaaactacccatcatatctcccaaaaccccatacccacgaaaatcaaaggagaaagaagtccacccacacctgaaattttgaagtcccactcgtagacacgcacttcacgactccgaaaatgccctcctttcgcgatttggagcagaaatgatggccaaaggttggagctttgttgggcaacaatggtggaggaagaaaagaagaagaaggctgcgtgagagagagggagagcttctgaaatttcttttgggctgagtgaggagagagagagagatgctctctggttctaaaaagggttctctctttntctattatttcatttaagctatgccacatgtctccattcgagtggcgcanaaagggcccactttctcttttgacgtgacccatactcagc

SEQ ID NO: 35651 - DNA, 392 bp, Glycine max; identical to SEQ ID NO: 35541
  unsure at all n locations

SEQ ID NO: 35652 - DNA, 377 bp, Glycine max; identical to SEQ ID NO: 35543
  unsure at all n locations

SEQ ID NO: 35653 - DNA, 417 bp, Glycine max
  unsure at all n locations
agctttangcactatagtaaattaataccgaatcttcaaattgaaaagtgaactgccctcaacaaataatgaagctcccttgagggctcacataatggaaccaaaccaaaacagctctgacaccaacaagtgaatttaagatcttgatagaaatcggagagatcattgagaggatataatttgagagaagcaagatccatgagaaacacaaagaaattttgatcaagaataatagtcatctgaagtacaatgaagacgagaaaacaaaatttaaagaaaatactatggactgtcaaaaaccagtggcaacctaagatgaacctaagtctccatacttgaacaaacaacatgatagccaacgagaatatttacaatgatcaactagtanatccaaactcgaaaatataaactcctcat

SEQ ID NO: 35654 - DNA, 389 bp, Glycine max; identical to SEQ ID NO: 35545

SEQ ID NO: 35655 - DNA, 435 bp, Glycine max
  unsure at all n locations
agcctttataatttataacaaaagaactatgattatcgaataatctactcatgttgtctttatgagactaacnctataaggccaagacagtacacacttgatgatattatagattctttagaatacatgcatattaatgaggaagtgcacaacggcaaaggaaatggaaatgattaagactctcaaattgatgaatctaaaacaagtaccggtcttgcaagagagtgtacaacttcaagatagcatcctcttgataatatcatcggcgacttataaaaagggataacaactcgacactctctcacagatgttgataattgctaaatatgagcaatttattataatacaaatatattggaaatatcttttacaatatttatttagcaattatgtttggcttaaatgataagaattaatattcttattatttatcgc

SEQ ID NO: 35656 - DNA, 384 bp, Glycine max; identical to SEQ ID NO: 35547

SEQ ID NO: 35657 - DNA, 442 bp, Glycine max
cgcaagcttaactatttgtaaaatgtcatatctgaactaaatcatgtctgcgttaataagatctgtcttagaccagtacaatcatatgcatcaaagtttgaaagccttcataaaacatgaaaatgattttgtgcatgaaaagttggaaacaacgtgttgaaaaaacactttctaaacatggcatcctaaacactgtcattttgagtaacaacattctgagtactgtagtcagcacaacaactttctaagtgttgatttatcattacataatttgtggtttcataacaactaacagatatgttgatttatgtgatgatcttctgaacatgagcaaatgcacattgacattaggttttcatactcatatccaacatttaataatgagtgttgtgactaaccacttaaaaattcgaacttcgtaagtgcttggacctttgtgtca

SEQ ID NO: 35658 - DNA, 396 bp, Glycine max; identical to SEQ ID NO: 35549

SEQ ID NO: 35659 - DNA, 430 bp, Glycine max
agctatgtgtaatcgattacactgatctggtaatcgattaccagcgattcgttctgaataaatcacaagatgtacctcttcagatggttttctgactttttcacatcgcatttaagtttttctataagtcataactcttctaaatgcgcctcttgaccacacatggagagtctataaaagcaaggctttgttttgcattttatatcaatccaatcaatcttatacaagccttgaatctctttgaacttcatcttctttgtgccaaaagctctacaaagttctctggttctctaaaccttgagaacttgcgctattcattcttttcatctcttcaccctctgtcacaaagaattcgacaaggactaaccgcctgaatcctttgtgcgcctctctttgccattctccaaacgaacgaacgactaactgcctg

SEQ ID NO: 35660 - DNA, 383 bp, Glycine max; identical to SEQ ID NO: 35550

SEQ ID NO: 35661 - DNA, 444 bp, Glycine max
agcttcatgatgatgaatcaaatatgattcaagatgttttgatgatgaccaagatgatgacaaaaagcccaaaagaattatttcaaggttgagtcaacaagttcaagatcaagattaaatcaagattaatttcaagtttcaagaaatgacatccagaagaatcaagattccagagaagatgacttcacaagggaagtattgaaaagaatttttcaaaaaaaccaaacatagcacagttttgttttacaagaaaagtttttctcaaaattttctaagttaccagagtttttactctttggtaattgattactagtttcctgtaatcgattaccagtggtaaagtttgatttcaaaagcttttaactgaatctgctatgttccaattgattcttaaatggtgcaattgattacaatatattggtaatcgattaccagtgtatctga

SEQ ID NO: 35662 - DNA, 390 bp, Glycine max; identical to SEQ ID NO: 35524
  unsure at all n locations

SEQ ID NO: 35663 - DNA, 410 bp, Glycine max
gttataaacctacaaatgctgacaagatgacgatctctttgcaactgaatgaaagaatcttacctcgtctgcatgggcgatgaccacaacgggagagggtccctacttgtcacatccacgagagctttgccaccacacggtggatgcataaagattaagttgctactatctgaccaaaatcccgatcacatcagtcgaattgactgcagatctgctccctgggctttgaattaaaacatcggcagatcatcgtccgacccaggatctctgcgtctaatccaatgtaatccagtcgtttggacactatagttgtgcctatgctctacggattgcttctcttgctgggcatacgctttctttactgatcgacatgactatctaatatccaacatcttattcgtgcattcccg

SEQ ID NO: 35664 - DNA, 386 bp, Glycine max; identical to SEQ ID NO: 35526

SEQ ID NO: 35665 - DNA, 337 bp, Glycine max
gagccaaatctgtctctcctaaaccttgacccaccgtgagaatgtccatccttaccctcgcaagcatataagaatacatgggaaattccctcttagagcaatagagacagaatctttcctatgaaagcctaacaaagacaagacggaaacttcctctatccatgagttggagaacgctgacagaatagataggaacttctctatctactaatgggagaacgtcaactaggaagaagacgaatgatagatagctcctgatcatggatctaacgagaaacagaacaaatgtgctcaaaggtctttggaccggacaatatctgaacgatactgaattgtc

SEQ ID NO: 35666 - DNA, 413 bp, Glycine max; identical to SEQ ID NO: 35528
  unsure at all n locations

SEQ ID NO: 35667 - DNA, 314 bp, Glycine max
agcttcgatttgctgcgatccgcgaggaacatgcatcaaccgcaccgatcagtggcaaaacagcacaatcgtgaagcataagaggagacaacagagagaaggacagagagtcaccgacctaggattgcatcttcgtcctcctcgccggtggtgacagcaacctcctcgagcttgacgatgggagcgacgtgtgctccggtgttctctgcgacgacgacggcgggtgcctccttctcttatcggagctcgggatcggcgctcgacatcttgtggaaggagagatggacacagagagatagagagagagatcccgt

SEQ ID NO: 35668 - DNA, 215 bp, Glycine max; identical to SEQ ID NO: 35530

SEQ ID NO: 35669 - DNA, 441 bp, Glycine max
  unsure at all n locations
agcttgaagtgagaaagtgtggaagagtcagtctccctacttttattcgttgaccacagagtggtacctggagatatgtcgcggnggtcaggagaccttgnggacgtcaggtggggtgctattgcccaaaaccaagcttgaccaatcctgacccaacccgggcatagtcagttagtgagaacctgtgacgtacctaaacaggcgagctcctggcagtcaaccgataaaagaacaaagaccacaaagcaagtaggcttgtgtggtggctggccagctatggatcttgagtgattatggcctctggtaatcgattaccaagggtgtgtaatcgattacaaggcttaaaaatgaagacaagaagttaagatggtctctggtaatcgattaccaagggtgtgtaatcgattaccaggcctaaaaatggngtcaggaagctgagat

SEQ ID NO: 35670 - DNA, 406 bp, Glycine max; identical to SEQ ID NO: 35532
  unsure at all n locations

SEQ ID NO: 35671 - DNA, 409 bp, Glycine max
agcttgcggactataccttctaccaaacacggccgtgtttctgtctcggcccggatctaaggcgggttgcagcaccggcttcgctctcctaactgtactggaggcggctgacgtggctttatcctctatagttttctggacttttaacatgacctccgagatggaagccatttgatcttttaaagccgatagatcggccttcatctgttcctgcacgccctcttcagtatccatttttctggatcgagtgttataggggtgccttggtgttttcttagctatgatgaaattcctaaagaaataaacaacggcgagtatgccaccaaaacatgaatatgcaaatggatgatcggagcacttggatccaccccaaggtttctagataacatgatgatgtcagaacttctca

SEQ ID NO: 35672 - DNA, 453 bp, Glycine max
agctctgatgagaaaacttccttgagaagcttctttgagaaaacttccttgagaagctagagcttaggctacacacacccctctaataactaagctcacatccttgagaagctgccttgagaagattcctaaagaagctagagcttatctacacacacatctgtaatagctaagctcacctccttgagatgagaagctagagcttaagtacacaccccctataatagctaagctcacccccatgccaaaatacatgaaaatacaaaaaaaagtccctactacaaagactactcaaaatgccctgaaatacaaggctaagaccctatattactataatggccaaaatacaagcctagaagaagatttacacagaagagtggacccaaccttggcccatgggctcatgagaaccctaaggccttctttagcagctctagcccaatcctcttggag

SEQ ID NO: 35673 - DNA, 365 bp, Glycine max; identical to SEQ ID NO: 35535

SEQ ID NO: 35674 - DNA, 460 bp, Glycine max
gcaagcttattggtgctagtactcactactgctgcaatatatttttcacagagaatgatacctctagataccatcataagagatatgactaccttgcgggttatcactaaatgcctagttagatctctcccttatacgtcccttaaatatgggcacggagcaaacacgctgcgggccatttttacactgccatgcataagtatcatatacccttttgcttatgtgcagagaatattatcatactgtgtacatctccgcattgcgtcttttgcatacgcatcgcatatgggacctgtcttgatcccttctgtatacaaaccaacggagggtccgtgtcgccttcttaaaaacgtacgctggggcactttgctacccctagacattgtgtctaagaaggtgacgaagtcctccggacccccgcattcctagatacatcttgtgtatatgcactccttcatgc

SEQ ID NO: 35675 - DNA, 396 bp, Glycine max; identical to SEQ ID NO: 35536

SEQ ID NO: 35676 - DNA, 308 bp, Glycine max
agcttgagcctaacgatgctcctagctgctgcttcccttatctctaacagtctccctctttatggctttggtgatgcccgacttcactatgacaccgagtgcatgaggagaggcttgatatggcattggactcttgactcttagacttattgtgaaaaaatctcactacttaatacatgacctattgattatcttcatcgtagatgggaagatctcaagtactatatataaccgtgctgagcatgctatgcaatgcacgctatacggactatgcaatatgcaatgtctacttcctcccctgttggcat

SEQ ID NO: 35677 - DNA, 400 bp, Glycine max; identical to SEQ ID NO: 35538
  unsure at all n locations

SEQ ID NO: 35678 - DNA, 386 bp, Glycine max; identical to SEQ ID NO: 35539

SEQ ID NO: 35679 - DNA, 561 bp, Glycine max
  unsure at all n locations
cctcctcgccatacccaagngatagatatcgtaagtgtactgactattcaaatnatactcacgccgccgcgaccacattgattgattgtaacactcgggacattaaggaactgtcagctgcagctcgaactactgctatgtctcgatatgggctgagccgagactaacgtcatcccactgcaatcctagcatctatcctgaacacgcagggtaactagttgatcgcaagaccatactatctttatagcgtgtcatacgacactttacatggaccatattcttgcctatggaggctcaaaatgaaacgctctacgtacgacgtacacatatgtacctctaacttcttaagtacaggtgacatatggggcatttcgatgatgtactcactccgacctcttacactggcgagtctaagagatgagaacctcctgataaacgcgcttgttacacgtctatctgaagtgacgacatggtcatcaatggccttaccaagctcgggaccttaaatgccggaaactaacaacagtatccagtcgtactatactctattgacattacccg

SEQ ID NO: 35680 - DNA, 392 bp, Glycine max; identical to SEQ ID NO: 35541
  unsure at all n locations

SEQ ID NO: 35681 - DNA, 447 bp, Glycine max
agcttgtttctaccgttccaattaaggaatctttatattcgctatgcctaatatctcttaagcacattaaaactgctacatctatgcccatatctattaaggtcttgatggctacttggacacaaccgatgtgtaaatacttgtatttacggctatgttcataaattgagttttttgaaagcaaatgaaacttttcccctatgtcttgtcctagaggaatattattttctactgtttttattatataattaaagttatgtttgtctttaattgtttcaagaacatacagtgtatcgtgagggatttctgggatgttccagtcatccatattttgatatatatctttgaatcggacttcctcatcgaagagattgtgttttgtggcgacctcatgggtctgggtttcatgctcattgagaaaattgttgctcttgggtgacatcattg

SEQ ID NO: 35682 - DNA, 377 bp, Glycine max; identical to SEQ ID NO: 35543
  unsure at all n locations

SEQ ID NO: 35683 - DNA, 389 bp, Glycine max; identical to SEQ ID NO: 35545

SEQ ID NO: 35684 - DNA, 432 bp, Glycine max
  unsure at all n locations
agctntcttgagaaaacttccttgagaagcttctttgagaaaacttccttgagaagctagagcttagctacacacacccctctcataactaagctcacctccttgagaaacttccttaagaagattcctaaagaagctagagcttagctacacatacctctctaatagctaagctcacctccttgagatgagaagctagagcttagctacacacccnctataatagctaagctcacccctatgacaaaaaacatgaaaataaaaaaaaaagtccttattacaaagacaactcaaaatgccccgaaatacaaggctaaaaccctatactactagaatggccaaaatacaagggccagacgaaggaaatacctattctaatatttacaaagataagcgggctcatacttagcccatgggctcgaaatctaccct

SEQ ID NO: 35685 - DNA, 384 bp, Glycine max; identical to SEQ ID NO: 35547

SEQ ID NO: 35686 - DNA, 382 bp, Glycine max
  unsure at all n locations
agcttctncttcttttccctataaataggggaatgacggaagaacaaaaaggttcaaccctcctggtatcagagaatcacttaaaattagcgagaaaaattgtttccgtgaagaaaatccaagccgaggcgcttccataacgcttccgagacattttcgtgggtgatttcgcgaggatttatcgncgttcttcatcggtcttcgttcgttcttcgacgttcttctgtcttcaaccggtaagttcccgaaatcgaacttttcaattcattctatgtacccttacgagtcctcatttgtctcacgtgttcttattgttatttcatttactttccgtacccccttttgacgtgctttaatcatttattcaagtcattttctcgcc

SEQ ID NO: 35687 - DNA, 396 bp, Glycine max; identical to SEQ ID NO: 35549

SEQ ID NO: 35688 - DNA, 383 bp, Glycine max; identical to SEQ ID NO: 35550

SEQ ID NO: 35689 - DNA, 320 bp, Glycine max
  unsure at all n locations
agcttgtttaattatggngtacccatcacatgtggnactaggtggcggtcgggcgatggtgcacaacaaagctttcacatccacaatgcgcgcataaacccaccatcccctgttgcccacctccaactgagctcacgtactcccacgtagcccatctnnctcgttctctcaacaccgggtccccatcaatcctctcaagcttgcacaacatccaagcaaaacaacgttcaaacagcacaagctatcacagccaagcaaaacagagcaaatgcagaaaactctgctcaacacatcaaccaaaatcacagcttttctcacgt

SEQ ID NO: 35690 - DNA, 532 bp, Glycine max
  unsure at all n locations
agganagcnannnnnnnnnnngggagagcgggcatagtncntcgaacnccctccccnttaagnnanacncacagctagngcgcactgacacgctaagcctagtgttcctcaatgtttgtatttttgtgtcgggctaagcgccagttgcacgctaagcctaataagcttactggtctttnttgttgcaattgggctacattntggttaacttttatagttaacacattttgaggcatgttttggttgaatagattgcatgaccgagacattgtgaactggttattaatggtgtngaaattctgatttttgagtgagcacgcgttggtgttgggtgatggttttgtgaattaaatgcgtgtgagtgagttggttagcttgcatgacangaaattgtggatgaaaaactaaatgcttcacattaccgtgtgaagtgtgtgcacttaattgcatgagaaccactgaatcaatntcttgattttcatgaatctgaatttctggtgcaacatgatgagatataacaagcctggtgtta

SEQ ID NO: 35691 - DNA, 373 bp, Glycine max
  unsure at all n locations
atgctaataatgtccttattgatccatattgtgtatgtgtgattgcattgaatatgatgatgtgaaaagtcggcgattataacttcagtcgatttacatgaaatacacataaccgaaaacacttgtgtgcttgagagaaacactagctctgtgaggagtgaaacatagttgatctttatttgatacctgtcatacttgctaacctatttcaaactctgagtgcattctttacatgatcccatcatgaaaactgtgacaagtgtgaacttgaggattggaagctaaaattgttcgaaaagtacgcaattatctcagttgttgtgattcattacatcctanacattgtcattaatctaacttagtgtagtattag

SEQ ID NO: 35692 - DNA, 394 bp, Glycine max
  unsure at all n locations
atgaaaatggatttggacggcagccagacttgttttcaagatacatgttagttataacttataactaggtaaaattgattntgcctcanaaccttggtttgactagaagcgataaacgtagcatttgtgttgtgctgaaaattttgcactaagttgtatagcaaacttgctttcaggataaaagtattcaaacataaatcacttcacttgaaaatcaattttaaccanaatcaattntataacgccaatttcattcataatcaattntgcaaatgctcgcccaaacacacactccaacacaaaaatccttgttnttcaaaggcacacatctgcaagtgagagtatcatagctgtctatgcaaaggtcgtctgcattactttatagatatcatat

SEQ ID NO: 35693 - DNA, 301 bp, Glycine max
  unsure at all n locations
atctgaggatcacttgagagtgagtgataataatcgatctcgtgaagaanatccaagtcgaggcgctcttcgtaactcgtccgagacatttccgtaagcaaatccgtgaagattntccgccatccttcggtcgttcttcgttgttcttcggtcttcaactggtaagttcccgaaatcaaacttttcaattcattctatgtacccttggtggtcccttcttgtatcgcgtacttttattttcatttcatttactttccgtacccccttatgacgtgctntagtcatttatttaagtcatttt

SEQ ID NO: 35694 - DNA, 391 bp, Glycine max
  unsure at all n locations
cacaatattctctaagattctcttgatctccctgttaaaaatttctgcctgtccattggtctggnggtggtatggtgtggataccctgtgtaccaccccgtactttttaagcaaggcatgcattgttctgttgcaaaaatgggttccttgatcactaacaatntctttaggtactccaaacctacaaaacagattagacctgacaaaatctacaacaactntagcatcattagttctagtgagcttggcttccacccattttgaaacatagtcaactgcaaggagaatgctaacataaccaanagagacatgaaaagggcccatgaaatctataccccagacatcaaacacctcacagaatagcatantgtngtgaggcattnggtgtccg

SEQ ID NO: 35695 - DNA, 205 bp, Glycine max
caatccaatccttgtgtccggactctcagccacttatgatagccgccgatgatcccattactgcttcccctaagctctctgtcctttcttcacgccgcatcccatgccttgcgaactccttggagtaacctcgcgttgtggtcactgaaaccccgtgcgatgaaaggcgtgatgctttcgtctgatggcactcctctcatgggac

SEQ ID NO: 35696 - DNA, 415 bp, Glycine max
  unsure at all n locations
gggcgtaggattgcangatntctnacnatannnaganncgngagggttagagngaggggcggatgcaagctacaccttgtttttcttccctgacacaaaccggggggtgttgatataatatcccatcgacaccaccgggaaaagggatttaatataaactgatggagggcagtgacaatacaccatacaagaacagacacaatggtgaattgcgacagaaaaaagttacggcatattgcatatactgtggtagcttgactccaaagagcctatccgataacttaccaagggccaaattaaaaggatatccctacacgacagggttaccaggggaaagacaacttccattcatatattaaggccgatatatcatatacctgctcagcagatataaaggctacgacatgaagatgct

SEQ ID NO: 35697 - DNA, 395 bp, Glycine max
  unsure at all n locations
agcttgtataattatggggtacccatcacatgtggtactaggtggcggtcgggcgatggtgcacaacaagctttccacatccacaatgcgcgcataaacccaccatcccctgttgcccacctccaactgagctcacgtactcccacgtagcccatctcctcgtttctctcaacaccgggtccccatcaatcctctcaagcttccacaacatccaagcaaaacaacgttcaaacagcacaagctatcacagccaagcaaaacagagcaaaggcagaaaactctgctcaacacatcaaccaaaatcacagcttttctcacgtaaagaccacagtaacaattccttcgatccaattcgttaacccgtggatcgactccaaaatntactggaagtctat

SEQ ID NO: 35698 - DNA, 361 bp, Glycine max
  unsure at all n locations
acatgagggcaatgttagcatatctataaaatatctcatatgtgcttgatttccttctctcaagtattcagtggttcttagaacacttaacctgaaagtctaagcaattaagatttaacatatcaacaatgggcttgaaatatngtagagtctactatttcttggagaaatttcagttataagagcaagggtaacatggatcaaacattttaatccatggctgactagtttntgattatataaaaacaaagtagttgatgttgaagtntataatattaagaaagaaaaatttcaatggaagttactttgccttcaggagggaattgatcaatgtgagaatatataaccattaagttacatt

SEQ ID NO: 35699 - DNA, 235 bp, Glycine max
agcttctctatttcttgatacccattctacattttcagcaggcagaggttctacaacagaatgacctccacggccatgatagaccaaattggagagattccccatctgagatggaatcctccccatgaatccattaccacagacgtctgggtgagtcaaagatgtcattgcacataggagagaacgaattgacataccttcttcaaggaattcattggcgctcacgtcaagatat

SEQ ID NO: 35700 - DNA, 276 bp, Glycine max
  unsure at all n locations
cttgacaactccttgtttttattttatcaatacgcagagatgacagttgagagagtgatccaatacttcgaaatggatttccactgaatctattaatagacagatagagatatcttaatgatgaaagttttcaaaatgatcttggaagagcaccaccaattaagttgttggaaaaatctagcatgtcaatatttctaaaagcctcaatttgatctgtcagattgcctgaaagttgtgaactccgaacttgcagtgttgtgagtncatgggaaatac

SEQ ID NO: 35701 - DNA, 273 bp, Glycine max
accatatgagtattgggatagggaagcgaatcgtgggctctatcacctgataccaaaccagataaccaccaaagctatcaactctaccatcatacatactcgatgcagtgtaattcccatagacctttggtactttaggctgggacacccatcagctgaaagaatacaatgtatgaaaacctattatcctcttctgtgacaccctgtacccttcacatatatattaataaacgaatgaaaagtcaattattaattaaaagtatttttaaaaca

SEQ ID NO: 35702 - DNA, 241 bp, Glycine max
  unsure at all n locations
accgttcagttgaacaagatgagattgcctacggcatttttctagagtctaataccactttgggagctcttcttttntcatgttctccattttctttgattcttctggtttttggtctctcattaccatgagaggctaacttacctattgttgggggcttggataccaaacactgatgtaatgatctctactattccattaatgctattttaatggtattgcttccttctatgataattga

SEQ ID NO: 35703 - DNA, 489 bp, Glycine max
  unsure at all n locations
aggcagccctttggctgctanactgccnannttaggtaagacgcgccgatctatgagctgccctgtggcatgcaggctcttttacttttttcctggccagacccattcagcgtaggtatatttccggttgatgttatagagatgcgcctggtgatcgctaccacaggagtggtgcattgtgccacagtcttactgcacaacttcacatatagaaggcgtcgtatgcccagtagcatactttccagacatacacgtatactcagctttgacgagaacaaacgatgaacattggcatggcgaaactgatggtttgacagttgaccccacagacctgaagacgagagccgcgtatcaccattgatatacagaatcaacatatcgaagtcttgcttcgcttacacaacagagtagtatgcggatgcttaaataattggcgcggagaatgcgcacctaatatatcatccatgcatactatgcgtccttganaag

SEQ ID NO: 35704 - DNA, 399 bp, Glycine max
  unsure at all n locations
agctntattttattntatatatcatatttctataatctaatgtatttttatcacactattcaaaacttattttataaagtaaatatataatataaatttatctttaatgtatatttttttacataaattataatttcataaaataaaagtattttattatcttattaatatttatatatttgatttaatgacaatatcttttatctatattaacatattcttgttatttattatattagtattgcttttatttatatttaactctatttaatcagatacaaatttttttaaaagaagntaaatatatagtaaagttacataattactattttctattttttaaaatatttatgtatataaattaattcgcattatttttttatctatgctataataaat

SEQ ID NO: 35705 - DNA, 369 bp, Glycine max
  unsure at all n locations
tataaaactcagcttattcagacaagaaataaagattncaagatggatgttctttatttctctagagtcttagaaagggtatatgaaataggaagggaattccaattgaagtaccaaaaggtttggccaagaaatttaagttaaaaagtttttttcaacaaatttactctctggtaatcgattaccagaggatgtaatcgattaccagtggccaaaactgatttacaacaactattaaaatttgaattcaaaatttgcattgtgtaatcgattacacatatatggtaatcgattaccagcagtttctgaatgttttaattcaaattttaaagcttgtaatcgattacacatatactgtaatcgattacc

SEQ ID NO: 35706 - DNA, 527 bp, Glycine max
  unsure at all n locations
tgagtnnancnnncnnnnnnnnnnnnnggggggtagctgncacttagcnatcgacnnncaatttaantnagctngcgcgccgggatactntagagtngangtgtaggcatgcatatttctttatatattattcgccggaatcggacgtagagtgtgataagttatgaccatttgaatttctcgagagcttacgatgttgaatatatagcgtatcgatgtattatgcgccttaatcagactttagtgtgataagttatggagatctgaatttgttgagagctatggatgataagtaatgagcttatttatataatgtactgcttaatcggtggtaagtgtgataagtcatgacaatatgtaattatcgagagggtgcggtgttcgttgcaaagatcatgatatatttagaaactgagttgagttagatttgcaaagttatgacgaatttacttttgaatagatttcatagaggatttcttgagtatagatatatttgtggaggaaagaaatagtgtgaacttcttaag

SEQ ID NO: 35707 - DNA, 545 bp, Glycine max
  unsure at all n locations
aagtncccncnnnnnnnnngnnngngnnnnnnnnnagggngagcttcattcctctgtcattctctctgacactgnagacacaagcccgccaccngcactncctggagggcccaagngggncnagnngcnatttgttccccccccggnnaccaaaanccacccggggccttgnttgctgattntttttccgtaatgttacggaactttacgaattccgtaatgataattttttccttccgtaatgttacggaaccttacggattacgtaatcatcccttttttggctttcgaaatgttatgagacctcacggattgtgtaacaatgctttcttttgatttccggcatgttacngaacttcacngatcgtgcaacaatgctctcttttgacttctggcacgttatggaactttatgtattgtgcacaatgggtgccaatacctcgaagcgtcaagcaatgttgctgccataaacaatggccacggacgaaatanggtatacagttgccctcttactacctttatcgagatagangaaacaacataaa

SEQ ID NO: 35708 - DNA, 383 bp, Glycine max
agctttattatttattctttcttcctattaatatatcttgtgttggtaaatccacacatttaattaagttactaagttagtcaattaattaagctcagcttaacatctagcagtatatataaacatgcacggaaaggaaggatagtttaaatatatatatatattcttgtggtatttcagtaacctacataaattatcgactctgttgtgtaattaataaactctacgtcaccagtatgtagaatatatataaaagatataaacaatgagcaaacagcaccagtggtctagtggtagaatagtaccctgccacggtacagacccgggttcgattcccggctggtgcatattgtttctaactttttatctatgcagtctcatca

SEQ ID NO: 35709 - DNA, 315 bp, Glycine max
  unsure at all n locations
agttatatatctggcagaccaatgactactatttgtgtagctaatatgtattaattctttatcattgaagacannaatttattccacttataacatatangttaagaaaagcaatctcattgtttttaaatatatttctaatttctagtatctttcttaattgntactttgatatgttatagtttatacactattatntctctcttttgataagggtacatgggaggaaataataatttatgccaaaacacagataaatagaactaatttttttctcaaaatgacatatacangaaatgangcatactttttttt

SEQ ID NO: 35710 - DNA, 380 bp, Glycine max
  unsure at all n locations
tagcttanggatagatatatataaaattggaatagctgaggacaaagcttgcaacataacanagctcagaggtagattcggaaagataagtgtcttctactaaccaaaacaatgctcctaagttgataacctgcttggacttgccgcagtatgcaatctcaatcccagctaccttaaaggtagatgcctaagcctccttattcttaacacaacacgcttctttcatgaataagctcccagcccctaaactactgtaataaaacaagaaaaggtgacaggtggtactgctaccatgtaatcattccgtaagtatgtttaaattgctgtcacaaatttttgttccanacaacttgcaattatattaaaaaaattcatctatc

SEQ ID NO: 35711 - DNA, 271 bp, Glycine max
agctaatgtattctgggtacccaaacctcgataaccacagtgtgagattcatctatatcattcccttctatctctgccataataaagacagcgaaggccctaccgccttgagtgattcaagagcaccttggttgcttcaccagactaacacaagacttgcccgctgaactctcttgagagagcgatctctctcgtcctagaatccacacccacgcagtctcagaccacaattgcagaccaccccactatagccagaatgactaaccggccg

SEQ ID NO: 35712 - DNA, 427 bp, Glycine max
  unsure at all n locations
tgccgccgccacctgggacttttgtcattttctttaccaaaaccagtcactgaaaaagttatgacttttgaaagaatcttcacaaacaagtcacttgaagaattgtgactcttggaaatgtgtctttcgaaatcagtcactggtaatcgattaccattaaggtgtaattgattacacatcaacagatgtgactcttcattttgaatattgaaaatcttaacgtgttaaaacactggtaatcgattactacattctggtaatcgattaccagagaataaaactctntggtaatgattctgtgaanacttcttgtgctactcaatgttttgaaaaactttttaatacttattttgatagagtcttctgttgattcttgaatcttgagtcttgaatcttgatcttggatattcttgaatcttgaatcttg

SEQ ID NO: 35713 - DNA, 209 bp, Glycine max
tatagaaactcagctcatgctacaaacatttataatagatctcctcaacagccaaaccctttttcttcataattattatgaaccttccaaccattggatccattccaggttggaggaatcatccaaatctgagatggacgagtccctcacaacaacaacagcctgtccttcctttctagaatgctgctggtccaagcaagccatatgtt

SEQ ID NO: 35714 - DNA, 405 bp, Glycine max
  unsure at all n locations
agccttgaactattgtttcttgtcccctgaaaaccattaaggtggtaaaaattattgggttgaccggaaatgacatcgacaagtagtggccacaaatgaataaaaggtgtacttcatacttttttcatccaaacagaagtcaaattttacattgtgttgtataacacctcggacgaatcgcaccgaaatcaaaggaatctagaggctctacangtatgagactgtatagttgaaaatgacttaaaggaattaattgatactacttatactaataagatgtatttacttttcggtagctcatcacataagaactccacagttaagccgtgttgactttgagtaattatgagatgagtgaccttttgtgaaatttcttggaaagtgtgtgagtgatgaaaaaacatg

SEQ ID NO: 35715 - DNA, 308 bp, Glycine max
  unsure at all n locations
gcttaataaagtccttagtgatccacattatgcatgtatgatagcattgactgagatgatgtgcaaagttgaaaactctactatttagttgttataattcanacacttttaccgagacacttgtangattgagagaaacactagccttgtgaggattagaagttggtgattattcctagtgatctgtcattcttgctaaccatttcatttgaagtacatctttgtctactcctttcatgaacttatgacaatttgtaacttgagaattgaccaatgaagctttttggaatgtatgtagncatctcatg

SEQ ID NO: 35716 - DNA, 374 bp, Glycine max
  unsure at all n locations
tgctatcttacgcaaagaggggtgctaatctctctgattntagaatgaactgacccctcacctagaaacagctganacacgtatgtgtggaatatcctactatttatatcaacatagaggccatccaacacattctaattgtcatacatatatgcatttgaaaagaacatacattctcacgcgcaaagcattgcgtcaaaactcacacttaatttatatcctaaacatttgctatntacaaactacctacgtatgtttgaaatatatatcatacaaatttttattgcttcactcacatttattcatattggcaagctatttacattatgcacacacttgcattcaaaagggaattccgtgctatcatacattca

SEQ ID NO: 35717 - DNA, 586 bp, Glycine max
  unsure at all n locations
agtccnacannnnnnnnnnnnnnnnnnggggnggtacggacnttgacccganatgncgtnaacntnatctagctaggcaccgcagggatcactatagaagtcganctgcatggccatgcaagctnnattaaattcgntatatatggtnnngaaaacaaagccttgaccgggcagggtgagtacacttaagttctcatcggcgatcaatctctcttcattttgagttattgaatgacaaaccgccatgagatcacattgcatatactcacaagagttatgtgtggagtaataatactgctttctctgttttaatatgtcagatgatattttaacttgcagccaatgatctgtgtttgctacatgaagagaaacaatttctctataagaattttgacatgaatgatatgggtgatgcatcctatatcgtcggcattaagattcatacacatagatctctacgtatcttttgtctatcacangaaacctatattatcacaattctagagagaattttgatgaaagattgctccctagtgtttgctccattgtgaagggtgataccgctcagttcgaccaatagaccaag

SEQ ID NO: 35718 - DNA, 288 bp, Glycine max
  unsure at all n locations
ctcccactccaagtangcctgtggatcattctttcctttaaatggaggaatgttgagtntaataccatcaattcggttttgtctaagaacaccatcattccctcttctcctcctttcttcttcattatgatctctattctccatttgatccaacctctcatggagcgcatcatctcgttgtttcattaacctctccaaatgttgcatcaaagcttgcatttggaattgcgaaagccccactccatcattaagattagtacctgacatctcatacaaacaaatcaaacg

SEQ ID NO: 35719 - DNA, 266 bp, Glycine max
  unsure at all n locations
agcttctatatttgctgaaccattntatcaataaacacaagttgagttttattcagaaaattagagtttatctcttttatcttagtgagagtgattctcctaaattcttgagtgattcaagaacaccttggctgtatcaaaggactttcacaacctttgtgtgttgccctcgctggaaagagtgattctttccttcctttcatcatcacccttgttctttcaaaccacaattccagaaaatccacctctgcccagaattatctcgt

SEQ ID NO: 35720 - DNA, 483 bp, Glycine max
  unsure at all n locations
aaccgcgtaggtttagtgctcncnccntnnactacgctggtcgaggactactcggggaatgaagaacatatgatctttgacgacgtcgagaacggcagagcgttgcgaaatcctcacggaaaacgttacggaaacgtttcggaagcgcctcggcttagattgtcttcacggaaacaatccttccaagcaaattcgatagagagagaagtgcctaaggggctaaacccntttcttcttcacttcctccccctattatagcanaataggggagatggntgccgcccagctcgcccaggcgagccacgttgcttcctccagaagcaatagccttctggaggaaatcttctgangggcccagtgngcctggtgctatttgcaccccattttactaatacaccccctttgcttattttgggaatctttttcgacagttacggaaactacgaatttgggacgatacttgttttcttccgtatgtacgga

SEQ ID NO: 35721 - DNA, 410 bp, Glycine max
agctcgtttctttcacaattgacaaaagagtggtagtagcagcctggctccaccccatctgttaaagaactcggctgctcaagtaaagaatcatattcattcactatatcccccaaaggacacagctttctttgatttcactcctagtgtaaaaacctttctatttttgcttctttttctttcactatatgtgcatggaagacgcaaatttgtgaagtggggtgtttgatattagaagattgaagtgttgaagagtggtgagttaatggttcaatggacaccatagggagattagttgctgggactcataacaggaatgagtgtgttcctatcaatgctgatgaaactgcaagactgagtggactctatctgcctgatgtctcagttcatctgaacagtttgaacttaca

SEQ ID NO: 35722 - DNA, 251 bp, Glycine max
  unsure at all n locations
ggggaagcatcaaggggatgctaactggggtatggcggctggtgatgatatgtattcattgtacattcgttaggatcattcacctagttatggtttatacatttnaatttggagcatttgacacagaaaggtctaccttttgacagaaatggttattaacatatgttacctacagcagcttaattctttataggtttctgcttcagcattatatcttgcttatggcttaggttttgttaggttcttattct

SEQ ID NO: 35723 - DNA, 222 bp, Glycine max
  unsure at all n locations
agctctatttttattttagtagtgacccactaacctagaatgaaaataacttantgccattaacctacggaattaaaaataacttaatggctgagtgtgactgacattatggcaaccaaatgtcacccgcagcagccaacaagtcagccaccgtttggtctcccaaaaagctgatgcctaggttgccaattgggcccttattacaacttgaaacacacctac

SEQ ID NO: 35724 - DNA, 288 bp, Glycine max
  unsure at all n locations
ttgaacgagatcagtatattcattgcacacataaagtcgtttacgtggttggngatatcttntggggggcgctgatgcagtgaagttagtcaatgcatgtaattnggagtttttgataaacagtacctacaaaacaaacaggtacagactctcactgcttgattntgttggggtgacaccaactgggatgacattctttgccggctttgcatatctggagggtgaacgtcttaataatgtggtttgggatttataacgcttttgaggtatatttttaagatgtgatgt

SEQ ID NO: 35725 - DNA, 362 bp, Glycine max
  unsure at all n locations
agctntgttatttttctatgcacccttaggggnnccatcttgctttggatggtttcatcttcatctcgtctactttaggtattccttttctgtgttttaagcgagtttcgaccgatcgtttaagccgtaatctcacttaatcgatgtttaaatgaatttcaaccaaccatttgtgttgtaatctcgtttaatcccccttcaaataaaatccagccgattgttcacgctataacctcagttaaaaaccaaaaaataataaaatatatgaaaataataataaaatatatgaaaataataataaaataattaaagatctaaaaataagaataaataataaataatgtccgccgacatttactttg

SEQ ID NO: 35726 - DNA, 301 bp, Glycine max
  unsure at all n locations
catcagaccacttccagggtgctggaactacttcacttggttttatggggcctatgcaagttgaaagccttggaggaaagaggtatgcctatgttgttgtggatgatttctccagatttacctgngtcaactntatcagagagaaatcagacacctttgaagtattcaaagagttgagtctaagacttcaaagagaaaaagactgtgttatcaagagaatcangagtgaccatggcagagagtttgaaacagcaagtttactgaattctgcacatctgaaggcatcactcatgagttctct

SEQ ID NO: 35727 - DNA, 372 bp, Glycine max
  unsure at all n locations
atcttttggttcatgcggngaacgcctctagtgcaacacccgtgcagcctaaggcacccacccagaaggaagctccccaagttccaactccgaacacgactcgaccggccggtaattacaacacgacaaggaacttccctccgaggccattgccggaattcaccccgctcccaatgacgtacgaatatcttctaccatccctcatcgccgatcatttggccagggtaactcccggaagggtcctcgaaccccctttcccgaagtggtatgaccctaatgcaacttgcaagtaccatggaggtgtcccggggcattccgtcaaaaaatgcttggccctcaagtacaaagtccaacatctaatggatgctggat

SEQ ID NO: 35728 - DNA, 309 bp, Glycine max
agcttcattctttatgagacgaaccattccaagtgttggagaagatcaacgacaatgcctacaagattgacttgcctagtgagtataatgtaagtgccactttcaatgtgtctgatctatctctctttgatgcagatggaggagccttggatttgaggacaaatccttttcaacgagggagtgatgatgacataaccaatggcaaggaccatgaagcacttgaaggtcccatgaccagaggcagacttaaacaagcccaacacatcatagagacaaagctggtcatttgtatagctgtcattgatgatg

SEQ ID NO: 35729 - DNA, 337 bp, Glycine max
  unsure at all n locations
cttcgattcattctatgtacccgtagtggtccacattgtgttttgtgtcattttattctcgnnttggggactttgtataccccctgttgacgtgcttaagccattntacttaagtcatttctcgcttaacttagaaatacaataaatntccaccgaacgtttgaattgtattatccattaacttcgggtaaaataaattccgaccgttcggtcgtgccgtaaccacgttggaaatcaaanagaggtaaaaaataatataataattcaaaaagacatcttttagtagaataaagcgganaatcaatcggacgttttctttttgggatttctcattctt

SEQ ID NO: 35730 - DNA, 360 bp, Glycine max
  unsure at all n locations
gtattannatttcttttatttaataaaccctcatcccttcacanattnnttttacnncgtgttggttggtaccctttgtgatgaattnngcgaactctttgtnntcgtgggagccagnnaatgacttgcagtagaagtaccgagaaaagtgagaattnttttgtggagcccgctgagccaaagtgatgacgttgggattattttgggagagagttgtgttttgttaatcaactccttcataactagttccataattcttttgttgaattgaggatgtaaatcacaaatttattttccattatgcgaatgatgtgtactgagttactatacctatatatatatatatnatcatttacttat

SEQ ID NO: 35731 - DNA, 380 bp, Glycine max
  unsure at all n locations
cactatctcatnggtgaatacactgcatacatgttgttttgtatctatggcnaaactgaagacgcgcggcagtttaactactttcgcgtcacagcccccangaagcagccggacctcatcaatcaactggatacactcggagacattctcacgggacacaaattccaattacacatgtacacaacactgcagatcaataatcatataattggcatgcaccctaaaatctaagactaaaagtgcgacataaatcatggctgagataataatatgctctatcagcaatgtggaaagaccattaatagtgcgaacatctttttgtttcttttaatatgggtacaatgtaaacatcgagtactcgatatttcttacacacaact

SEQ ID NO: 35732 - DNA, 331 bp, Glycine max
  unsure at all n locations
tactaaagtctcttatgcgtgtggatcaaaatgtatgcatgcatgtaaaatgattattntaggaaatcatttaaatatacaaacatatatactatgcagaanatactagtgaagtagtatctaacatgtcgtgaagatcttacgaactaatcaaaggtagaaaatgtaggctttctcaaaggttacgacattaatattagtgttacgagtcttgaaaggcactataagtgtatggatagtgggccataagataattgttcagcatcacgtagtgcacaaatgtcacgaatccaccaccacataacatggtccattcaaaactcaacgtact

SEQ ID NO: 35733 - DNA, 339 bp, Glycine max
  unsure at all n locations
gcctacacatatgtatttgccaccttaccctagttagaaataaaggcaattatatttttggcagcctcatacaaagccttatcatacaagcggtccctaacaaatgtaaaagttgaaaagaaatgttcttcctctagagattgagtgacattgagttaaactcaactaaattataaacacacaccttagacatctntaatgaaggatctcagagatggatcttgcactcaaaatctattcttgccaagatgcagcactagagatgcaggtgggatctccatgaagaacctcactgctttcaaaaacaaataatggtctaatggctatcaacctatcatg

SEQ ID NO: 35734 - DNA, 249 bp, Glycine max
  unsure at all n locations
cactcagagttgcgatgaagacgatggcacgggcaacaccagagttgcggcagagacgaagatatgcaacagacgtgagtgaattanggtgtggagctaataatattttanaaaatcgagttcattagcatcagttttctaaaaaaaacgatgttaacttatcatttaccaacatcgggtttgtcaaaaaccgatgtaanggagtgatgtaatattaatatcagttttttaaaaaaatcatgtaactta

SEQ ID NO: 35735 - DNA, 293 bp, Glycine max
ggccttccttcaccttctggtctccaatgcgaactttgaccattgttcttccttcccgcaatgcttcttttatagcctaaaccatacttcccacgatttccttgagtatttatcaggctagttatgccgccgttgttttttcctaaacccatcccgggttcaaaaccgttccccaacataactcgggccatcattaccgctgcatcggacacacaaggttgcccaaagagggtgtccacggaggaaatgctgaccacctcaaaagactggaaagcagtttctaacgattcttc

SEQ ID NO: 35736 - DNA, 332 bp, Glycine max
ctaagctctcacagatgtcttcacaataatcatcacacaacagaaaactattatttctcccctcatattctccaaaaccccgttcccgtcgaaattcagaagggaaggaattccacccaaacctgaaattttgaagtcccactcgtagccacgcacttcacgactccaaaaatgctctcctttcacgaattggggcagaaatggtggccaaaggttgaagctttgctttgagcttcaatggagaatgaagaagagaaagctacgtgagagagggagagaaaaggcttctgaatttctgctttggctgagtgaggagagagaaaagctttttg

SEQ ID NO: 35737 - DNA, 259 bp, Glycine max
  unsure at all n locations
gttagtcttctttcctgtaattaagaattttatctagggggaaatttaattaaatttgaaggttaaaggggcccggtattggctataataattggttgaagtgatgcanggaaatgtcaagcataactgcattgaaaccacatgataaagttcttttcaaaatgacagcaaatttagtaagtgttctagatcatggtcattcaaaagaaattggattcatgagtcanaattcagcattcaaacatactatttgaatgat

SEQ ID NO: 35738 - DNA, 518 bp, Glycine max
  unsure at all n locations
nggccgcttaaangactgagagtgcccanancatacacacacanccccgnaggaatctctaganaacttcaattatggtggacaatttcttattatcgtgctggaaacaaatgtnctacacgtggagtaatgacatgcatgcctctataacccttaccacccactctgacataatgccgagactcacgaacgccaacaggcttagccttctcttaatatattgaacacaattcaatggcttcttctgcaatgtacctcttaacattggatgctattggacgatatagatcctttgtatacccttttaagatcttcatgtatcgctcaacccggtacatacaccgtagataaacaggaccacaacatttgatttctctgaccatatgcacaatcaagtgaatcatgacgtccaagaaagctacgtgaaaacacatctcaaacttgcacagtataactgtggcctcattatgcactcatcaactngacangatcaatgacttgctaatataacatggaan

SEQ ID NO: 35739 - DNA, 309 bp, Glycine max
ctccatatcgaatttcccgagttgttaatccgccagggaatggatattacattcagaagtgggatctgggatggcactcgttttaattcacatgattggttattcaatgaaattacagccttcaggccacacatttcagtgtctagcaatgaggtagtgtattgtgatgagcctggagatagattgtcaacgtttgtgatgaggggtgatggactgcttcaaagatatatatgggacaacaaaactctaatgtggattgagatgtatgagataagaaaagacttttgtgacaattatggagtatgtggg

SEQ ID NO: 35740 - DNA, 393 bp, Glycine max
  unsure at all n locations
ttaagtgtatatggtatttcttgcccacagctnttttgtttattttgatggatcatagatctcttgtgtcggtcttaatttgctatgtctaattcggttctaattattactgacagcttattaacaaaaatttcttctgttcactttgacgatcagatcagatcattcattaatggttttttaataacacgagcactagctaaaagaattaaaaagtgacgcgtaaacacagtcattagatattgttacaattaatattttataattctatgatgacttgatatataataacaaatatacagggttgatacacagcaaaaatcagaattttttttaagaataagtttcagattacaaattattaagagaagtgataaagaatcacacttaatc

SEQ ID NO: 35741 - DNA, 230 bp, Glycine max
agcttgcctgtcttatgcatcagtaatgatggcccgagttatgttggggaacggttacgaacccggaatgggtttatgcaaagacaacggcggcataactagcctgataaatgccaaaggaaatcgtgggaagtatggtttaggctataagcccactcatgcggatatgaagagaagcatcgcgggaaggaagagcggtggtcaaagctcgcgttggagacaagaaagtg

SEQ ID NO: 35742 - DNA, 443 bp, Glycine max
  unsure at all n locations
nggtagcccgatcgtagctactgatcaanacaacccaggaactagacttgtagcttcatgcagaaacatcttgttaattaacccaaattagtttagagtagagaacatgaaaatcggacttgctagtagaatcgggctgcccatgattggaatctgccctaataacgtgggaaatgatatcaatggtgtgcgatatatgtgaaatgtacgggcatcaaattcctcgcaagatgaataatagtctcctaaatgaatgttgatagcgtggaatgccttttaatgcaatatgtgcagatgtagtagctttccatatgctataaatagattgagcgaacaatgacatttgatggcgacttcaatgttgtaggtagttggaaacaatgttaggtataaatagtgtaagttgaccacccttgacatgaagtggtttctttcagatgatn

SEQ ID NO: 35743 - DNA, 220 bp, Glycine max
agctctatgtgtgctgaaccactttatcaataaacacgagtcgagtgttattcagaacactagagcttatctctcttatcttagtgagagtgattctcctaaattcttgagtgattcacgaacaccctggctgtgtcaaaggactctcacaacctttgtgtgttgccctcgctggagagagagattctttccttcctatcatctgcacccttgttctttc

SEQ ID NO: 35744 - DNA, 264 bp, Glycine max
  unsure at all n locations
tcggttaaaacatccaaaggaggcttccattgggaaatgacaatgccacacgaggattgcgcaacttcactccctaagaagtatttgagtggacccatgtcttttgtctganactgactatggagacgagatctaagtcagagaataccctcagaatcattgtcaataatgacaatgtcataaacatagacaacaagctacatgcaacgactagatggagaatggatgaaaaacaccgagtgattagtctcacaatgggtcatg

SEQ ID NO: 35745 - DNA, 412 bp, Glycine max
  unsure at all n locations
ccaaccttgttctttagattatcgacagatataaagctgatgcctagtagaacctatccacgcttgcctatttgtgatgaaggtagaaagaaaggatccaaactatacttcagtgaagagatgcccaacaaaagacaaaaggtgtagatcactaactattcaaggtactggaggaccttattcagcaacaacaagttggtgaaggagttggacaatcatgatgcttacacttcatggaattagactgtatggtttgatataatgaatgtgtccacttccaactatgtagattggcccattgaggatgatcacaaggactcaatatagttgttgcatccaatgaaggtataccactctgatgatgtctctgcttgctntatgaagaatccaaaagatggattcatcaagcatc

SEQ ID NO: 35746 - DNA, 150 bp, Glycine max
tcaaccattaaaagaacaaaaaccacaaagcaaggagccttgtgtggtggctggccagctatggatcttgagtggtatctggaatttggcctctggtaaatcaataccaatggtgtgtaatcgattacagggcttacaaatggagacaga

SEQ ID NO: 35747 - DNA, 268 bp, Glycine max
  unsure at all n locations
ggctgcaactttatattttgtctagagaccgctaccccagccaagctatcttggagaaagcatancaacttctatccctggaatacgcacccatcttgcgaaatacattntgagatgattcttatgacaagtcatccctttgtacctatcaaaatcaggtaccttgaatttcggtgggatgacaacatccggcactaagaaaatatcagtcatgttcgcgaatggatagtcgccaaagccttcaacaacccttaatctcttttcgatg

SEQ ID NO: 35748 - DNA, 176 bp, Glycine max
  unsure at all n locations
taaagcatgtcaaaaggggaaacanattataacctctntttcaagcaaaagctctgtctccacctcaagaccacttgaactgttacatattaatctatttggtccaactagaacaaactctgtcagtgggaagagatatggtctggtagtagtggatgactcctcaagatggacat

SEQ ID NO: 35749 - DNA, 127 bp, Glycine max
agcttcttatcatttaagtgtctcatctcaattcccaatcacagatatgttatacatagattgtgcgagtcatttcccatcaaatcaaggataatgcgcatgatcatcatggatcaatatgtctttt

SEQ ID NO: 35750 - DNA, 260 bp, Glycine max
  unsure at all n locations
cggccgttacaatcggtgagtacctcgaggaagttgaggaacgggaattggtaagtcattcaatattgaaattttaattttaaattcatatataaaaatgaaaatttgaattntattgaaattaaattactttatccaaacaagaaaattaaaatacaagaatttgaattgcctcatccanacaaaatatttacaaaatgaaaggaattaaatcagggcatcaaaatgtttgtatttaaatttctagaaattttaaatct

SEQ ID NO: 35751 - DNA, 387 bp, Glycine max
agcttgctgttgacatgtcgacaaggcttattgaagtggctaacatgtaagtagcctgattattggctatagttcttgtagtttctataatattcttaaatcgagattttcctatgctgtattttgaatgtatagctatgtctctttatatcaccaatgtttttttaatcagctaaagaaaatatattactgatggtacaaggagtaccatgtctcgtatacgattgtgtgtatgatgcccttcaacccaaaacaatgcagcctccctaatgcagagaataaattacatcccatttaaaccataacatatctcagcaactgcaattgaaacccgcagcctgcataacaacaaatcacagctgtccaactaactaaactaaaactaat

SEQ ID NO: 35752 - DNA, 366 bp, Glycine max
  unsure at all n locations
cgccacccagctcgcccaggcaaactaggttgcttcctccatatatcaccgccttctggagaacttccgggaaggcccanatgggcctanttgctatttgcaccccttttactaaatacacccccttgcctttntttgctgattctttttccgtaacattacggaaacttatgaattacgttatgatactggttntccttccgtaatggtatggaaccttacggattacataatcatcccttttttgccttctagaatgttacggaactttatggatcgcgcactaacacttccttntaatttctggtatgttacggaacttcacagattgtgctacaatgctttcttttgacttccgacatgtct

SEQ ID NO: 35753 - DNA, 350 bp, Glycine max
agctgtgcgctttattacataacttaaccaagagtgatatcttccatttcagatccccatcaaaaggagaaagagaattgatatcatcagtgactaacagaaaatgaagcaaaacttgatggctcttttgattggattaattggtgcagccgtcaccttatttgcttactcacaaaccttcgtatcaccaagtctgtgcatcacacttggccttattgttctcatgcatgttgggcttgcttgtaagagaaggtctgatatctttctaatttcttcttggttttcttttccctttcagtatttccttcatctatgtatatgccttgtttatgtgcaataataagtctttg

SEQ ID NO: 35754 - DNA, 173 bp, Glycine max
  unsure at all n locations
cagcctaatggatttttcttgattaatgggaatggccataccctaatttcgtccggggacctttgcttgatgacatgcgacctttctttggtccttgcgaggtgcttggcacccatcattatggcaattgtgaaattccgggacatgccgaanaagaaaaaaaaatattgatg

SEQ ID NO: 35755 - DNA, 377 bp, Glycine max
acctctggaagtttttctcttattgaacctcctaaagaaagctacataaagctgcctcggtaaaaacgcttcccagcctttgttaaccgttggatcttctccaaattggtctgcaccttcacacgacacttgtccatgatatgaccgttgggatctttgacgcaatatctggagtgtgctcgatgcttccgttcccaagagcatttcttatttaagcacttcagcctttgctgtcgtgtagattaggaaaaacgtcatttcttcttctttctttcttccaaagccatttctaaagttccaagcactttctccatcacccacagccaccattagccaccacaaaccatcattgttctccattgaaaacccacaccgag

SEQ ID NO: 35756 - DNA, 281 bp, Glycine max
tcaagtgttcgcgatatgtgaaaatgatgttccgagtacttcggatttggtccgaccattgccctctgatttccagctgggaaattggcgaatggaggaacgccccggcgtttacgcaacaagcataatgtaaacctttacggttttaaaagctctatagttgggcctatgctttagagttttcttttttgtaaggctttgtggcttttgtttttgaatttataatacaaggatctttcttcatctgttcctggtctctacccattctcattcatttgcat

SEQ ID NO: 35757 - DNA, 350 bp, Glycine max
  unsure at all n locations
cgaatcggacatccgtgtgagaagttatgaccatttggatttctttatatctttcggtggncaaatnccaaccctggtgagttttattccacccgattcggacatctgtgtgaaaagtcatgatcatttgaatntctcgagagtttccgatgtttaatttcgagcgtatcgatatattataaccctgaaatcgacctcagtctgaaagttatgaccatttgaatttgacgagagctttcgttgttcaatttccaatatcactgtatgtgatgcgcctcaatggacattcgagttanatgttatgaccatttgaatttctcaagagcttccgttgttcaattctgagcgtc

SEQ ID NO: 35758 - DNA, 202 bp, Glycine max
tgtgattagtagtatgactgaaaatgttagtcagtttgtcagattgattgtgaaggaatgcattaactgtatcccggtgagagtgtgatcctttaaattttgagagaaacgactatcatttagtactggattttgcatgaatctctgaagtatggactgaatgcatgaaattgaggatgatgaaggccatgtttgattgtga

SEQ ID NO: 35759 - DNA, 334 bp, Glycine max
  unsure at all n locations
agctctctagtatctacgagcggtaagtccttctcactgttctgttatgcaagtatggggatgtcacatatgtggaggaacacatgagtcagacttatgcatggtccaagatgacatatccaatgaagttaactacatgggcagtcataatcatcaaggattccatcaaagaggaccaccangattctatcagagcgataattttttgcaggaccacgattggagatattatgcaagtaataacttcaaccaaggaggttgaccctatcatcatcctagccagggttcgagtcagcaagagaagcaatctctcattatagaggaaatgctctta

SEQ ID NO: 35760 - DNA, 359 bp, Glycine max
  unsure at all n locations
agcctgagccaaatcctgactcaccataaaccttgaccccaggtgatantgtcattccttaccctcggaagcggaaagaatagatgggaaatttccaatcaaagaaaaggaaagaaggaagatttccaatcaaagagaaagcaaaaaaagaaaagaaggaaaattccccaatcaaagagtgggagaaagcaaaaagaanagaaagaaaattcccaatcaaagaatgggagaaaagtaaaaaggaagaagaagaaagaaagaaagctcctgatcagggatcgaaggaaaacagaagaaatgtgcagaaaggtctttggaccggacaatatctgaacaatacagaattgtcaccaaatgaa

SEQ ID NO: 35761 - DNA, 346 bp, Glycine max
  unsure at all n locations
agctngcttcttttggtgcatagaatgcaggcaaaaaaaaaatagtaagtgtcatgaatctctgacataagcttcaaccaattaacattgtttgtatgacaactgttgtagttggacagcaatcacacagtttgtccaccatggtatgctntatgttcctattggttatagttttagtatgctttatgttcctattggttatagctttggtgctggaatgttcaatttggagtccacaaaaggaggaactccatatggtgttggagttcttgctggagatggtacaagacaagcaagtgaaatggagctggagcttgcagagtatcatggcaagtatatatgaaat

SEQ ID NO: 35762 - DNA, 566 bp, Glycine max
  unsure at all n locations
aggggaagagctaaaaccttgagtattacangcgcgaattnnaagctcggtaccccggggatctctatagaaagtcgacctgcatggcatgccaagactagctttangtancatgattccattcaatgncgaaatgttacgcagatgagtcaatatatgttcanatccttcatacaccctcatanatanagtcctctcatcaggttcgtttgtccatttatacctctgacgacgcatgccngtgcataacgagaggtagggaccatgagggcaanagcagaatctggtcatgaaaattctagtcattttcaatgaataaccaatgacttaccattatgttatcaatgttgtacaaatggggaatagtaatgacactacatacctacgantgatgaaaatgaaatcanagcatnattgttgtactatttatggacagctcataaacgtaatatatatgcatgatcaataaggacagggaaatatgctctaatgtcaaatatgctttgcgtcaataatgctctgctatcaaaaatgttgtgtatgtgcattaagctagatatatgctg

SEQ ID NO: 35763 - DNA, 124 bp, Glycine max
  unsure at all n locations
gaaagaagcctaacccatttacaagggcggcgaccacagatggaaagggtccctatctgccacattagctaaagctttgttagcctgtgatggatgcatgacaatcangttgttgtgctagatg

SEQ ID NO: 35764 - DNA, 269 bp, Glycine max
atccttcttttggacctcgcatactataatgctgagttgctatcaggaacagcttctgaaacaatggtttgtaatatatttaatgaagagcattgaatgtactcaatgttcagtattgaatacattacggaattaattgtccgatagcaatgactaatgaatactataaaacccaatgttatgctaaatacgcctagatattaaatttataaagcaatgcattccataaaattaattctaactaccaatcaacctgttactatctcgac

SEQ ID NO: 35765 - DNA, 321 bp, Glycine max
  unsure at all n locations
actcacgctcaatccatatcggcatcgtcctcatcatgtctggttncatattattatctggtttccattctttaaggaccataggcatacctctaattgaatagggacccttgaccaatacagcttccttatcttcgtgtgatgtgaatctcatcaagaaataaccatcatcgtgatagtatagatcacgaagatgaatgaaattccattgacgctccatgataaccttcaccatattcatgctaagatcatctcccattacatacataattagggcattntcctagaaacgtaattcagattccacatcttcatcttcta

SEQ ID NO: 35766 - DNA, 320 bp, Glycine max
  unsure at all n locations
agcttgcatcattctctgctaatgcgcgatccacacgcgctgagcgaggggngtgttgcgctaacgcgcctacaaaggcccaaagtccacttcagcagctataaacagagagccagtccaagggaaacaagagaacaccaccacagaatcccctttgggggaaatcattttctctctttctttcatttactccctttctttcaccccccctcattgtaaaaagccctgaatggccatagtggctaaaccctttattatggcctgacagcctataaaccaatgcgatgtatgatgtactcttcacttattatcaatgcaat

SEQ ID NO: 35767 - DNA, 318 bp, Glycine max
  unsure at all n locations
ctatatgccaaagtgcatatagggatctcagtaaacactaaagatgaattcgtttcatagatattaatttgatagttatgtttcttaagtgagaaaatattgagattcttagagcatctttggttgaagaattcattttggattcttggattattntttatgggtcatatgatgctatatagaatgcaacaacttctatcattttttgctccaatgataaaattcaatttgaattcttagactttacttgcacagaatnaaaaagaggagtttttaggagttcttctcctaaaatccaacctttatcatgaaatactc

SEQ ID NO: 35768 - DNA, 167 bp, Glycine max
ggttatttatgtatggttcctcaagtcatagcggcgtatcatgctgtccaaggccctatgtgaacctccaaactacctataacgaatagtatgccatcgatctgctctatcaacgccataaagatctgctcatccaggactttgaataacacatattcagtttaata

SEQ ID NO: 35769 - DNA, 411 bp, Glycine max
  unsure at all n locations
agcttgcttcctttcccactggaatnncctctatcaaagccactctgattactttttcctcctctgggagcataattctaagggaagccattcttcctaaaacatctatcaactgtatgattgtctttgccacagtaagtacatgaaaatcctgaattcgatgaggttgtgcttgctgcattgatcaagctactgtttcctatcatatcattgctattaatctatctttcttgttgaattgcataagaaaagactctagttatgccaggtaaaggatccatcatcaatacattggatctgacagtgttgtactgatcatttaatcccctaaggaattgcataactcgatcttgcttctttctttccataacactaacaagagcatcacatgtacattttagattgcatgta

SEQ ID NO: 35770 - DNA, 319 bp, Glycine max
  unsure at all n locations
cccttaagaagattcctaaagaagctagagcttagctacacatatctctctaatagttaagctcacctccttgagatgagaagctagagcttaactacacacctcctataatagctaagctcacccccatgacaaaatacatgagaatacaaaaacaaatccctactacaaagactactcactcanaatgcctcgaaatacaaggctaaaatcctatactactagaatggccaaaatacaaggcccaaacgaagcananactgattctaatatttacaaagataagcgagctcatacttagcccatggactcgaaatct

SEQ ID NO: 35771 - DNA, 343 bp, Glycine max
  unsure at all n locations
agcttctcgcttatgctgtgaacgcctctagttcaacacccgtgcagcctatagcacccacccagagggaagctccccaagttccaactccgaacacgactcgaccggccggtaattccaacacgacaaggaacttccctccgaggccattgccggaatacaccccgctcccaatgacgtacgaagatcttctaccatccctcatcgccaatcatttggccgtggtaactcccggaagggtcctcgaaccccctttcccgaagtggtatgaccctaatgcaacttgcaagtaccatgggggtgtcccggngcattctgtcgaaaaatgcttggcccttaaata

SEQ ID NO: 35772 - DNA, 151 bp, Glycine max
  unsure at all n locations
atcgggccataattnctccaatcttctgcattnttctgagccaaattcgtcgcgatatgatggattatgtgggtcttgtagagagtttggatgcgaccgaaatcttccttggttcatctcttgctggttctcaccactagaagtagatagt

SEQ ID NO: 35773 - DNA, 359 bp, Glycine max
  unsure at all n locations
aaacatgctntgttataatgtttttgtttttagaaataatcacaaaatgttgctctgttttaatggtgttctatataaatcttcaaaacacgtttacagagtagcattttgtaattatttatganaagttaaaaatagaacacgttctctctagccaaataatcccttangaccttttcaattaatggtgttagaaacatttattttatacatatattttagaaacaagtttttcgtgtattttaaaggttggagttgtgctaatggccataagatgtttcacatggtagagggggaagaacaagtctgactttttagcttttttntttttttgtgcgttagttctcattggttgatgt

SEQ ID NO: 35774 - DNA, 499 bp, Glycine max
  unsure at all n locations
agggagcttttataccattagtatacacnacaccagcacggnancggngaatactttaaagtcaccctgcaggaagacaagctggcggattttctccttgcctgaagcagaagccgacgcacaccctaatctgctcaataatgcaatggtatccataaacccaacatagattactctaccttcattggccacatgatacaactagaatgtgacatgtgcttatcatgaaggagtaccactgcataccattgagcactgtatgaccttgatacatattgtgcaaagtctgattgatgcaagctggctcacacttaatgaggacaatcatgtgtgaattctgacatcgtcaagagataatatgcatgatgcttgtggcaatttgaaggccgttgtcacatgttttcaaagactcattaacactttatgtttaagctattactgtcaacaatagtcacaatgctaataatgtatatgaatctgatgtcactcgctcctatcg

SEQ ID NO: 35775 - DNA, 494 bp, Glycine max
  unsure at all n locations
agggatgttattctgtatgtacanaanaaacacaagccacgagcaactctganacnctttacaagcacaaagcnattcttcatctttcacaggagacaccatggcgagcacaaaaangnggcnncnccactacagacgaacanggaaggctaaacactcaatgcaattgaaggatccactccaagcaagactaaatttgagttatggtctagtatttttaaatgacgtgtgaatcgttcaacttatttcttcaatcctattttcaatcttcatgattgtgaatgggcttaagattgaatatgaattattttanggaataatttcctaacttctactttattcacatattatttagacgatattccaacctaatcttatatctaaatgatttgtgngattaaattagattgaattaactctaataacattgattgaaccttctacaatttgatcattctctacaaaactgtgaatatttcaatttgcattggatn

SEQ ID NO: 35776 - DNA, 399 bp, Glycine max
  unsure at all n locations
agctgaagtgtttatgggttctattncttgatttttattggtatgtcaggggctttgaatgatttacattgtcgtttgattgcagctgtagatattctaccattttttatatagaaaatattcaacatacatttgtgaagaaaaagatatgcactctagtcacaccagaaaaactaatttacttttaattntctacagtatatatactaattaacatttttaatttattaatctctatatttactttctcttctatcagactttaatcctaattttttcttctatattttcttccatctcattacatattacatctatcatctttnttcctattatttctgacagagtcagatcttatgttgtctgccgatggctggtgtctatttacagatcttcact

SEQ ID NO: 35777 - DNA, 265 bp, Glycine max
gttaaatgaagtaatgaagcatggtggagctcttggggtggtggggcttagctacataagggcaacttcagatcaaacagtctttcttgtagagatccactcttgagcaaggacctctcaagaactattcatagcctctaaagtgcaatcttgaaacaaactttatcaaatgaacttttactgctttgctactcttactgacttaaaagccacatagtggtataatatgacctgaaaccaaccagagggaggaatgtttaaaaat

SEQ ID NO: 35778 - DNA, 571 bp, Glycine max
  unsure at all n locations
cgctcctccnnnnnggggnnnnnnnnggggnggtacnggaatttgagnagnanntctngcgcnaattctagctcggcggccatgcgacactatanaagccggcaggcttgcatagcctggaggggtgtgctgctctaccatctgttncataagcaaaagcaccgggaatgtgtgctaccatcacgaattatcgctctcccttttccattattgggaggtaccaacttgatgccgccagaatcccctccaccttggtgagcgtgatactttgaacagatccagccccccttttgtggcaaatagatctgtagttgcattcctatctcggaaccatatcattaattgctactgatactggcctaacaaaggcaaccattatgtgcttccacgaatggactcgggaagattccaagttagtgtaccacgtaacagctaccccagtaagactttcttggaaggaatgcaatagcaatttctcatcttttgcgtatatcccatcttctgaaatacatctttatatggtgcttgagacaagtagctcccttgaacttgtcaaggtaccacactagan

SEQ ID NO: 35779 - DNA, 301 bp, Glycine max
  unsure at all n locations
atctctcttatcttagtgagagtgatgctcctaaattcttgagtgattcaagaacaccctgnctgtatcaaaggactttcacaacctttgtgtgttgccctcgctggaaagagtgattctttccttcctatcatctccacccttgttctttcaaaccacaattccagaanatccacctctgcccagaattatctcgtgaccataactcccattttacacactcaaattaagtgattcttgatcctaaattgaatttcaaaacgagatctttcacctcgttttggaatcacctcatttggag

SEQ ID NO: 35780 - DNA, 353 bp, Glycine max
agcttgtttatattactagaagactatgagatgtttcctaatagtgcaatagatgatgatggtaaattggttcatctagcactaatgggagaagcagaacctgtcactttcccagaagcaattaaaaaggaagtatggttagaagctatgagagaagagttgaaagccatatagaggaacaagacatggaagttggctagtctaccaaatggaaaaacagctataaatgtcacatgggttttcaagaacaagctcacaccagataggagtattgctaaacacaaagccagactagtggcgaagggctgtatgcagaaagaaagctatgattacaaagaagtctttgcactggt

SEQ ID NO: 35781 - DNA, 336 bp, Glycine max
  unsure at all n locations
ataagtatattcactaggagaacatcgtagtggaaggaaattgtactgatgtgattcaaaagatccttccacccaagcataaagaccctggaagtgtaactattccttgtttaattggagaagtcaccgtgggaaaggctcttattaacttaggagccaaaattaatttaatgccactctccatgtgcagaaaggtgggagagttggagatcatgcccactangatgactntacaacttgctaaccactccattaccagaccatatggagtaattgaagatgtgttggtcagagtgaaacattttatcttcctggcagactttgtggtaatggata

SEQ ID NO: 35782 - DNA, 498 bp, Glycine max
  unsure at all n locations
agcgatggttancactcagtgcacaggcacnnnnantaggangcgggcatcctntagagtcacctgcggcatgcacgcangtcatgtttgtttgtttaaccagcacgcacagcggtgagggtgattctattaatatgacccactctcctcacaataacctaactattatctatatcatttctatggcattatgaatgacacgatgaactgacatacagtgtctataaacatcactggcacgtggaatttctatttacaaaataaactcaagtcataacgataatgtacaccagatatatactatgcaacataatatttgttagcaaagacatctctacacaagtaaaatattgttattcggctttcatactataaaccatccctactccatatatgctttactgatcgagtgctttaactttcacttttgtatgacagactattcgtcaaaaaaccgcgaatagaaactgacttgtctatctagcatttcggactccc

SEQ ID NO: 35783 - DNA, 336 bp, Glycine max
ggctttgaatgatgcatattgtcgcttgattgcaccggaatattttaccatttttgtatagaaatattcaacatacatttgtgaggataaagatatgcactcttgtcgcaccagaaaactaatttgacttttattttctaacaggtatatactaattaacactgttaatatattaatctctatatgtactctctcttctatcgcactttaatcttatatttttcctctatattgttttccatctcaatacatattacatctatgcatttttttgctattattcctgacagagcaaaacttatgttgtctgccatggctggttccttttacagatct

SEQ ID NO: 35784 - DNA, 361 bp, Glycine max
  unsure at all n locations
agctncattgttgtttattgactccanattgctgcaaagaaggacagagatctgtatggtgatctgcagatcacatagaccacatactcttgcgacaggtgtagatttctgattcatggcaagctgagtttctaaggtgaccaagcaatcaagttttccctcaagctttattattttcagaagatgaagatgaatctatggccacctcatgaactcctctataacaatagcatcatctcttgcactgaatagatgggagttctaagccatcttcttaattaaatgactcacctcgacaggagtcatatcgccaagagctccaccactggcagcatcaaatactcttctacatgctgctaag

SEQ ID NO: 35785 - DNA, 502 bp, Glycine max
  unsure at all n locations
ngggtcttggggttcangcnagtactnacactatnnnaaacacaagccccgcagcatagcgcgcgagaatngggagctctgggcatctgtgttttgttgatgcatacgcaagngcaggagaggatgatgaanggatgncancngcngcggccctggcanccctngntcgggaggccagctgtagtgaaaagaactcanaattcacctttgactacatttattcaagttgctgatactgacaatgagcgcttagagggatacaactctcttagcgcatcctcaaaaatataacactatggcttagcgcaacagggtgtgctttaacccaatccaagcctcataggggcatgcgcttagcaaatgatgtaattattgacgctgctatgaccattaagaaattgggttagctggcatgaatagcacttagcggattgaccccaattaaaccacatccaatcggcgttacggtgatgcctcgctttagcagcgaaaacaacccccg

SEQ ID NO: 35786 - DNA, 318 bp, Glycine max
  unsure at all n locations
tgtccaaggtccgcaaaatacatgtggcatcctacttggcacactaagacatgtgtccaccctccatgtcagctttggcacataagcacatatgttcggcccttagcaatcgggctcccaaccaacaggttatctctaacctcttaatgtaaccactttatctcttggcatgtattcaattatctacaaagctacatattatctggaagtaataattatctactagttttatctctaagctatacattatctataactntatctatataagctacagattattgtctacaagcaatgattatctgcaagggctataat

SEQ ID NO: 35787 - DNA, 435 bp, Glycine max
  unsure at all n locations
accacactatctgtttttaataattctaggagagaggattctaggcttgcggaagtgtcactgcctccgcaaaccagtaccctccctcttcagttcacacaaccctgtaataaagatgagtattgtttctcttgcttacctgcaaattacatcaaaacagcattaaagaagaacaataataacaacactgaanaacatgtgaagttcgctgaagttatcattcatgtcatgccattatttgagcaattaaaacaaataagctntaatcagctagacaagaaaatatgtgcgtgtgtgtgtattatttagaccaattcctattatcctatagtattaactattaaatgacaacanaaaatttggagccacataaaatatttatattttaaaataatgattgatcatntgtcttgacttaatgcacatgaatatctg

SEQ ID NO: 35788 - DNA, 270 bp, Glycine max
ctgagtttgtgctcgaaggtcgcgcatagcaccaaacactcgaaaaatacatgatgaggctatgtcgttgtttcgcttcatacagttgggtcaacgatatgtgactgacgagacctgtgagtgaatgtgcggagacatcccttctgagatcagcgtgtaatcctcccactaagcaatacaatagagcctgctgcgttatgacttggactcgactagctagagccaggaactgcacgtatactgactgaactgaaccaatgtgacggagtc

SEQ ID NO: 35789 - DNA, 410 bp, Glycine max
  unsure at all n locations
agctttttagattgacacatatcttnaaactattgggaaaagacacaatgggcctatatatatgtttgctgacttcaaaaagcaacagagagatttcaaaagacaacttaattgtcaaatgctctctaaaaaactataggtcaaacactttcaaatcaattgagtattcttgtaagatcttcaatttgtattatcatctctaaaagagagaaattcttctgtacattctaaatactgtgttgtgatcaagagattgtttatctctagacttgtgagaatcctgaacacaatggagacgaatctcaaggtgtgttcagaagttgcaaagagtgtacaaagatagcggaaaatctcaagtgcgttgcttgatgacaggacatagacacgagaagtggtcgatcaagataaaa

SEQ ID NO: 35790 - DNA, 169 bp, Glycine max
  unsure at all n locations
atccttatggcctgcctccggacttcacccgccgtttcatccttanatatntaagccaagcccctactggagaggggcaactcccaccttatgaagactatcccaggcaagacgatggagaaggagatacccatcttggccccctgccgaacatagtccgtaatacccc

SEQ ID NO: 35791 - DNA, 91 bp, Glycine max
tgaagccttccagcctggtgatttattgattgaaggccggtttgggttggggttaaggtttgagtttgtgtttgaggttcgtgttttggaa

SEQ ID NO: 35792 - DNA, 399 bp, Glycine max
  unsure at all n locations
tatactaagctttgttttgctatgtaacacacttaatcaactacaaggcttttttttattttcttaaaaaacaacctctcctacccttgctttttgtaatggaataaaccaaattaaaatctgcaatggtaaagaaaaagtacctctcatactataatagaagaaaggaggtcatcatggtaattggtggtaaagtagtggtgtttctactcttatttcttacatangaagccattccattcatgagaccatttgtgtatttccagtaataattttcaattcagaaaaacaatcaactaaacattctcaagacttactcaccaaattaatatcattgttccgccatangaagccatgctatttcatgaaatatgaaaacctttttaccttggttgggtt

SEQ ID NO: 35793 - DNA, 246 bp, Glycine max
tcaagcttcttagtttcagatgatgcagatgggtttgtagctacctcatgcactcctctaatgactatggcatcatttctggcgctaaactgctgggagttagaggccatcttctcaattaaatttctggcttcagcaggagtcatgtctccaagggctccaccactggcagcatctatcatacttctctccatattactgagtccttcataaaaatattggagaagaactgttctgaaatctgat

SEQ ID NO: 35794 - DNA, 328 bp, Glycine max
  unsure at all n locations
ttttaaccaaaaatnttaaaccatgtggatttaaatcatctccctttagacaccaacaaatatatagccatttctcaaagggcaagcaagcaaccacattatttcacagaagatggtaccattgaaaaactacaattctcaaatatggagacaagagttaaaacacagcatgtgtagcatgcacattgcaaatatatgcaaaacaaatgagttcaagttattgcagcaaatcaacaatgttatattctgaatatgattccaattaatgttaacaagcagactagtaaacacgaaacactctgcttgcgatagtatataacaaagttgt

SEQ ID NO: 35795 - DNA, 376 bp, Glycine max
  unsure at all n locations
ccggtcctgaaaggaccgaggataagggctacataggagtgcgtgagctcaatttaaaggtgggcaactggggatggtgtgcttatgcctgacttgtggaaatgggagaagtgatttgctccatcgcctgatcgccaccaagtaccacatatgatgggttccccataatccaataagcttgatgtgagaaagcatggaagagtcaatcttcctactttctgttttttggccacagagtggtacctgaagatatgtcacggnggtcaagagaccttgnggacgtcatgaggggtgctattgcccaaaaccaagcttggctaatcccgacccaacccgggcatagtcagtcagtgagaacctgtgacgtacctaaaca

SEQ ID NO: 35796 - DNA, 241 bp, Glycine max
  unsure at all n locations
aatactatttagattcgagaaatagcctaattgattaacactatatagtagaaatgagacaggaatatttattttcaccgctataattaaagagtttcatgtngtgagttaaccacccaaaatactatatatattggttaccctgaaatgaatcaaaatgtagcaggactcaccagacaaatggggcattnttccttatcttcttctggagcatccttattaacaatcacataagtttcac

SEQ ID NO: 35797 - DNA, 422 bp, Glycine max
  unsure at all n locations
agctatagatgtatgttnatttaatcattgttatctttgaatcatgttcaactttaccattggctctatatgaatgttatttaccttatatgaataatctgaacttgtcttttttaaaaatagttgaccccagtgccagaacttgggttctaatcgaaaaatatttatccagcaatacatgtntagctntcatcttacccattagaaatgaactggcctaattcatcccagaaactcaaggagagcattgtctgagcctaattcagctattacacgtgagagacattctctctaactgaaatttcttatatgnttatgttgttttagattcttctttataatttgaacattttttctctgaaattggtaaaattgcattctcggtcaagtcagccaccttattttcgttagttcctgactca

SEQ ID NO: 35798 - DNA, 386 bp, Glycine max
atcaatcattgaagacagtgatggagatttgtgtgacgtgcctggttaaagagcccgcatatatgccttctatagaggatgttttgtggaacttgcagtttgcatctcaagtacaagatgcatggagaggggattctcacagtagtgaagggtcaccaggctcagaatctcgagggctacccttccattagtgtcaaaccacaggttttcactttttttattttgtatatttcactgtaagcctaaaaggttaatgcttgcagttgcagatacagcagcatcagaatagtataagttctttatgttggaacacctttgctaaaaaatctgctgagcttccatgaaaaactatgttgtccgagctttgcacttatgcagattttttt

SEQ ID NO: 35799 - DNA, 321 bp, Glycine max
  unsure at all n locations
ctttaccttagggaggtcctttaatggtgattttccaccatggagatgcagcgcaagtcaaaggagaagaagtaagaggtggcgccatccactanggaataagccatggaagaaggagcttcaccaccaagatgagccttggataagaagcttggagaggatgcttcaatggaggaaaagaaagagggagagaaagagaaagggggggagcacgacattgaaggaagaaaaagggagagaagttgaactttgagttgtgtctcacaagactctcattcatcaaagttacaacaagtgttacacatgcttctatttatagac

SEQ ID NO: 35800 - DNA, 579 bp, Glycine max
  unsure at all n locations
nttttnttaggtagggggcttgacttattcggnngactaatatctagcgtcggtacgccaggggatcactactagaagtctgacnctgcatggccatgccaagctgntngctttcttatcatatacagcannacanagaaatgggtttagtgcgagagtgactcagcttcgtggtagtttcccggctcagtcacgcagtggacctcaanaatgtcgatgtatagaacagaactctatttgagccagcggaaggatgaacgtaatatcatccgcgatgtcaaacgggctatgtcgtgccgcgattgaccgaagtgcgcatgaagacgacgcttagtcgtttgcgtagctatcatgctgcttcgtcttacaagacagcaggnatagaatgtttgatgcggataaccacgtcaggtattatgagcccgtctgcgtgactcatattggagtaagacggatcatgtgggcgcggaagacgccgctagatctcgcgtgtcaactggcttgtctgtcactagtgaccaaaggcgcaaattaagacattaagctgctcgtgctataatgagtgtggcaaacagacag

SEQ ID NO: 35801 - DNA, 276 bp, Glycine max
  unsure at all n locations
gacaagcctgttgacacccggagagttacgtcatcttccgcgctcacaagatctgtcatactgacatttgagtcacgttgacgggcggaaatacccgagtggttatccgtataaacattcttttttgctggttgtaagacgaaaagcctgatagcacgcacagactaccatcgtcttctacgcccttcgtcaatcgcggccgagaagcctcgtgacacgcggagaattacgtcatcttncgcgctcataagatctgtcatactgacatttgagtca

SEQ ID NO: 35802 - DNA, 468 bp, Glycine max
  unsure at all n locations
agcacgcgtcgagctgatcgtagcatnaccccnaannnaannagcagccgngaagcaaanaggcgaccgcagcaaacaaatntttattttcaccccccgcnagccgggcgaggcggaaagcnnaaacaccccccccgcgccgcgacggangaaccgcgagaaaccaaggaccaaccgaccgcacgcagcgcagcgaagagaacggcgcccccaccaggcacacacagggggccgccggaaggagaccgccccagggagggagcaaccgcggagacacaaagaacagcgagaccccaacccgaggcccggggagagncgcganagacggcgccgaccaagggaaaanaaagggcccggaccaagcccccacggggacgaccccacgaagcgaccaccacgaccacaaganggagccgccaacaaaacccacgaaaggacccggcgacggacaaagggagccaaaagccg

SEQ ID NO: 35803 - DNA, 68 bp, Glycine max
gcgtctcgatatatgacgggagtcaatcatacatccgagctctaagtgattgtcgtttgaattggctc

SEQ ID NO: 35804 - DNA, 283 bp, Glycine max
  unsure at all n locations
ttaagctttgatccaattcaaatgacaataaattntttctcagatgtctgattgagtccaataatataacgagacgctcgaaattgaatgttgaagctctaagccaattcaaacgacaataactntttactaggatgtctgattgcgtcccgtaacatatcgagacgctcgaaattgaatgttgaagctctgagacaattgaaacgacaacaactttttacttcgatctctgattgagtcccgtaacatatcgagacgctcgaaattgaatgtggaatctctg

SEQ ID NO: 35805 - DNA, 415 bp, Glycine max
  unsure at all n locations
tcgcaagctntttagtgttatttantgtgactctttcactctttaaatgtcgagatttcaaccgtttcaaagacacttggtacatcgattaccagaaaaattgtaatcgattacagccgttttgaaaatatttggaacgttgtaaattcagtttgaaaacattttcaaactcattttgctactggtaatcgattacaacaatatggtaatcgattaccagagagtaaaaactttttggttaaggttatgtcaaaaactcatgtgctattcanagtcttgaaaaaactttctaatacttatcttgattgagtcttttcttcattcttgattcttgagtcttgaatactgatcttgaatcttgagatcttgagtcttgattcttgattctggaatcttgatcttgattcttgagatc

SEQ ID NO: 35806 - DNA, 294 bp, Glycine max
  unsure at all n locations
acgcctcctctcacttcttctcctttatcttctactgcatatccatggttgaanatcaccattgaaggacctcattgaagctcaaagatccagccttcatagaagcttctcaagcaagcttccatcatgttatagagaaaaaccaacttttacaaaatacaaaagataagcacctctttttcattntcttaaaaatgaaaagagtctcattagtatttcttaaggtgtagagcattaaggtagtctaaaacctaaatgatcattngttaaatattngacttttagtttctttga

SEQ ID NO: 35807 - DNA, 338 bp, Glycine max
  unsure at all n locations
agcttctttatttactgttaatcgcgctgaatcgngaaacggcaattccatgtatgattcactcacgttggcgaggttatgattntgagaggcaagtgaccagtgttgcagtcgagaattacagtttctttcattaggaccaagtcgaactttgtggtattcctgtggagagtgctcgctagagattcagattgtgcatgtttgagaaatttgtctaatttatttaggataaattatattgtcttgttcgaaacaaattatttttcgaaagtgtcaaagctctttagaatatatatctaataataagaagcatgttctccatgcatgtttctaattta

SEQ ID NO: 35808 - DNA, 502 bp, Glycine max
  unsure at all n locations
aggggccgcatcgtccattgatcctgnaccagcnanannaannaanngncngaagatcttactccactcagtcgctagaatacggaaaatctattttttttcgngaaatacacccgcataatatggtatgcttgttatgtgccacgttccaacccattgatgaatagcaacgagtagcagcaccctttanggagggtgacttcgtttatcgctcaaccacgcagtagactttaattgtaccaatgaacggcgtggtaaagagttaattgctcttggcatcttgtggcacattgagaaggggcccccctnncaaagtggtcctcccnagagcaacatctcctttaggaaaattcttagggggacacaacccccttctgttattttcccccatttttcattataaccccccccccttcttggagaatctttctcccaaagagcaccaccctaaattttcccgatactgtttctttcataatgtacgaaccttcggatacataac

SEQ ID NO: 35809 - DNA, 345 bp, Glycine max
  unsure at all n locations
agcttttgtttttttctaccactcangncngnnncgccgaaggcganaatctaatacttcttttacggtttgcgatggatgatctgcgagaatctatgttctatccgacttcatttatctcagtgaagttttctgcgcttccacgatgcaaatatacggtttcgcgtttacggttcctttctatttatttattatcggagctttcataacgatcggncataccctcatttggggtttggggagagtctctattgacgttgctgatcaaggtgaaaatattggatctttgatccaagtcttcaatgggttttgatcttgatgacgctgatcttcctcgatcaacat

SEQ ID NO: 35810 - DNA, 363 bp, Glycine max
  unsure at all n locations
agcttccattgttgagtttttgcttcccttttcacgctntaattcactccccacaagtaagtgcaatttcccttggttatttggctctccattgatgtgttttggtgctttagttgctcattntttgcaaaattcgtgaagcaatttgcatctgaatccatgcttgatttcttgagttaaagatttgaatgagaaggccttangcctatgttgtattctgaagcaatggggcatgccacattgtccccattctcttgcaatntgtgtccaaacatgcgcccaccaagtgctcggtgaaatgccccaatgatatatgaatatgattnttgcaaaattgggatggtggggctgttttatgtatgt

SEQ ID NO: 35811 - DNA, 446 bp, Glycine max
  unsure at all n locations
taagaggtgcaaattaaataccatttgatactgagacaatgtgacaaganatgtaataaataagacccaagtgtatacgataaaattgtgacagactccacatactacacatgtaaaacattaacaagccatcctgattcctaaacacatgatatgcatcttcattttcaaagccacggactgaggtccatcatctacaccaagcttctcaaggtcctcataaaaagcatcgggatttttcttccacaactcttccaccttatttatttgctgttcacttatttggcgagcccttaactgcttcttaaggtataagacttgtatattctctatgtgataacctaaaaggcactttcttgaagcatcatatgatatgccaaaatcatcacattctaataagcattantgtaagttaaatactatttcttgaagtttcaattactttt

SEQ ID NO: 35812 - DNA, 367 bp, Glycine max
  unsure at all n locations
aaaactagtcactaaaaaagtggtgacttttgaaaaaatcttcagaaacaagtcacttgatgaattgtgactttttaaaatgtatttttcaaaatcagtcactgggaatngattaccatttaaggtgtaatcgattacacatcaacagatatgacttttcatttttgattttgaaaattaacacatttagaagctctggtaatcgattacaagtattttgtaatcgattacacaagtttaaaatactctataactggtttaacataagttataactcttgagaattgaaatcttaacgttctatacactggtaatcgatactaccttctggaatcgataccagagagaaaactctctggtatgattt

SEQ ID NO: 35813 - DNA, 295 bp, Glycine max
  unsure at all n locations
aattgaaggaataaaagagggagagaagtgaaactttgaagtatgtctcacaagactctcattcatcaaagttacaacaagtgttacacatgcttctatttatagactaggtaacttccttgagaagatttcttgagagaacttccttgagaagcttctttgagaanacttccttgagaagctagagcttagctacacacacccctctcataactaagctcacctccttgagaagcttccttaagaagcttcctaaagaagctagagcttagctacacatacctctctaatagct

SEQ ID NO: 35814 - DNA, 466 bp, Glycine max
  unsure at all n locations
gggccttgatatactgataaacangacanacaggtcgcgggatccattataatcagaccgcctggcatgcatgccttcattcatttgtttattattaccgcaaaacctcatataggggctccttaaaccaccatgaattcaacgctttaccttctcttccaatagggctactcattaatttctccatgtatctactcacatggtaatgagtataatgttataacatgcactctttatatatttcaccgagtaaacttgctatacatgctcgatgggaatntccactggtcaagataaatactcttgctcttgaccatgaacttgtggagaatatataccttgaatgttgcaaatacatctgatgctgagaacaatactaaatacttaccaactataaagaaaagaaacctcaaaatgagagagactgtacctatgaaaatttataacccacgctatcttgaacatg

SEQ ID NO: 35815 - DNA, 156 bp, Glycine max
  unsure at all n locations
cgaaggaaactggtcatgaagaatatttcagattcgggagatgtatntacgtttgaggaaggtattaacacctctcacgtttgtcccanaggacaacagccttaaatttggattgtgtgacatattgtacctanacttttatttcttttttatttt

SEQ ID NO: 35816 - DNA, 333 bp, Glycine max
  unsure at all n locations
ttccttcaccttctggggtccaacgcgaactttgaccattattcttccttcccgcgatgcttcttttcatgtccgcctgagtgggcttatagcctacaccatacttgccacgatttccttgggtatttatcaggctagttatgccgccgttgttttttcctaaacccatcccgggttcataaccgttccccaacataactcgggccatcattatcgctgcatcggacagacaaagctgcccaaagagggagtccacggaggaaatgctgaccacctcanaagactgganagcagtttctaacgattcttctgcggcttccacataaggcatgg

SEQ ID NO: 35817 - DNA, 306 bp, Glycine max
  unsure at all n locations
gacttgctgtgagagttttactcgaattgggcttgcccatgatcgatactttgcacctaagtgacgtgggaaatgcttttcaatggtatgtggatatatgtggggcatgannatccttgccaagtgtgaatgattattttcctaaatggatgtatgatagcatggaattcccttttgaatgcaagtatgtgcaggatgtaattagctttccaatatgcagaaacaataaaatntgtatgatatatattccacatgtgtgtagttagtttgaatagcaagtatttaggatataatttagtgtgagtt

SEQ ID NO: 35818 - DNA, 340 bp, Glycine max
  unsure at all n locations
agctttgaatttctttgttccggaaacctttcttttctcatgtgcacccaaacccaatctccgggttcgaacacaaccttctttctccctttgatggcttgtttagcatagcttttacttttcctctcaatttgatctttgactctataatgaagcttcttcacatagtccgcctttgcttgaccttctttatgcttaanaacagaaacattatgcatatgcaaaagatcaagaggagttagtggattaaaaccataaacaacttcaaggtttaagaaagaagaatcatcggatgacgccgatcgaacatttcctaatagacatcatccaaatattattc

SEQ ID NO: 35819 - DNA, 310 bp, Glycine max
  unsure at all n locations
actcggatgattgattgagtcccgtaatataacgagacgctcgaaatngaatgtngaagctctgagccaattcaaacgacaataactttttactcggatgtctgattgagttccgtcatatatcgagacgctcgaaattgaatggtgaacctctgagccaattcanacgacnataactntttactcggatgtctgagtgagtcccataatatatcgagacgctcgaaattgaatgttgaacctttgagccaattcaaacgacaataactttttactcggatgtcctattcagtgacgtaatatatcggga

SEQ ID NO: 35820 - DNA, 229 bp, Glycine max
gatgatgtaaacggacttttggcctgaatgctcacggattacgacagtgaggtgatcaagagagataaacattcagatagcaaagacttttgataaagagaaccctaattttagaagaaactggttttaaagtttccgtaccgggtcgaaactctaagctcaagtgaacccagttctagacgatagatttaaaaattggccgagtatatatcgctacctcagtataatt

SEQ ID NO: 35821 - DNA, 360 bp, Glycine max
  unsure at all n locations
agctngttcttgacattcaataatcaagtataataatgtgtctcgtttttgttaaagttaacttatttattaattatattatctaatttctttttcttttctttcttgccgagaacatgaattcttgaggttacttgcacacaaaggaggtaaatagcacaaaaaggttgaagagctcanggattgttcaaattacatatgctttttggcaaagaataagatcctatgtttgctcaatggtgtcaaaaaaaattgttccctgcgtatataatcatataagatgacaacattctcttatatatgtattcattttttatgcatcccttgattacttcatgttttagtagtattcttttatgt

SEQ ID NO: 35822 - DNA, 238 bp, Glycine max
  unsure at all n locations
attcatncatcctcaacattcgcctacaatgcacatgtaagcggacacatcacatcctaaacaaatcaaaaatcaaaatccttcaacatattttgaaacctttatattttttgtgtgttggtgagtttatttccattncaagaatgttttctaactcttttgcgtgtctttttcaaatctctanacattntgaagatatttgacacatttcaagagctctanaacatatcaaattgtt

SEQ ID NO: 35823 - DNA, 321 bp, Glycine max
  unsure at all n locations
agctngcacttttttttattctgtgtaatcaagagatatttcaattgtttttttatttgacgttcaactaatttccctctcattgaattggtctactttaaaataaagtgatatttagaataaaaagggaattagtattttcatatagcatgcacgcaaatactagctactgcagttntctgatatctcatctacgctggaaatttccacttgtctgttgaaatactcttcccctgtgagtctgtcacttgtggagaattataataacttcgaggttgggaaataacatgctcatgttctggaagaataagaacaagaagt

SEQ ID NO: 35824 - DNA, 403 bp, Glycine max
  unsure at all n locations
cacatgtggnactaggcggcggtcgggccatggtgcacaacaacattttcacatccacaatgcgcgcataagcccaccatactctgtaggccacctccatctgagctcacggactcccacgtgaaccatattctcgtatctctcaacagcgggaccccatctatgctcttaagcttgcacaacatccaatcagaacaacattcagacggctcaaggtatcacagccatacaaaacatggcagatgcagaaaactctgtcataacaccgaccaaatcacaagctttctcacttanagaccccagtaactattctttcgattcaattcgataaccgttggatcgactccaaaattctactggaggtctatgagacattataccacattgtgaccgtngggatcag

SEQ ID NO: 35825 - DNA, 360 bp, Glycine max
  unsure at all n locations
aaattggatcatcctactaggacgactgaganaactggggcaaataaagagggtgagaaagagggagaaacccatgttgtgactgccattcctgtacggccaaatttcccaccaacccaacaatatctttactcagccaataacaaactttctccttacccaccacccagttatccacaaaggccatccctaaatctaccacaaagtctgtctaccgcactttcaatgacgaacaccacctttagcacaaaccaaaaacaccaaccaagaaagtgaattttgcagcgagaaagcttgataattcaccccaattccagtgtcctatgctgacttgctcccatatctacttgataattcaat

SEQ ID NO: 35826 - DNA, 292 bp, Glycine max
  unsure at all n locations
agctntgtcacttntgttgctnccatactcaaatttagatgggtaatatctgttggtgtctcgtcctgcgcgatttatatttgaaactntcggtgccaccagtgtactttaatttactcttaatttaatcgcaatacactaaatgaaaccaaagttttctactctcctggtatttaaccggatcttactggatcacactgaatcctgtcagattacatatacgaacaaaactatctaagtctctttttcatttactatctgctgctgatatgtttaccatagaactatattt

SEQ ID NO: 35827 - DNA, 343 bp, Glycine max
  unsure at all n locations
tcacgacgccactagggcggngttcacatacctgctatttgattttttacccggccaanccgatcacctgcggatgcgcactcttatttttcctagcgagtccacggtcgtttacattcctaagggaaagtataaaacggagatggtagaccaagtctgaatcattcgttgagaatggctcctgccgacaagacacacagtatagctgtgcttcangtccttcggtcagctaaacccaatctacgcanagctattataaatagttctgacaaaacgatcatctacgctatttgtgaaatttgtgacaatttgctcagtggaaacattccacttactgctagtc

SEQ ID NO: 35828 - DNA, 362 bp, Glycine max
  unsure at all n locations
agcttttatcattctactttnttttacttcttacaaataaaaaaatatctttcttattttgaagttcgaaaagttagtataaattattaccgttaaaagtaatcaaattaaatatatattaatacagtttatccaaaatttaataagatgtttacaattattttcatcanaccattgtctcatatattctatttttataatatagtgagtataattttatttgcaaaanaattaaattcaagtattttaaagaatttaaaaataaatatatatatatatatatatatatattantttaattacatatatgtatagatatnaaatattttaataaagtgcataaattataatatacatatatt

SEQ ID NO: 35829 - DNA, 340 bp, Glycine max
  unsure at all n locations
tctcttggtttaacctccattgatggacgaacccgttgttgtgtgttaggtgcaagccaatgcagnttcatcttgataacttatggttgcacttgacgtgtctattgtggtagtggtaaatgagctatggcatctgttggaagagtcttgaaagccttagatggtgtgtgctcatagttatacttctttcatgttgacgcttggacaatgatggtttccttctgaagagactcaatggatatggactcatggaaggaagattcagatattggattaccaataacgaatgctaaaagaaatctttgagcatttgtcaatggttccttttgttgaatagctc

SEQ ID NO: 35830 - DNA, 360 bp, Glycine max
  unsure at all n locations
agcttgctcatttantctttttccgaatgccnntgatagacatggagacttcttcgtgcacatccttaatgatgtcgaactcagtaatatctataatctcatatgcatgtcatacttgccaaatagccttgacaaacctggccttttgctttttaaacaccatttcatgagcacctcgcgccagaatttggtattcattccttcctttctctatcttctactcggccctagacattggctctttcatcttgtgcaccttatccttctatcagacactaatgtcattatgggaatatcgatcgatatgatatgtagattcttgctaatcgaattatgatatttggccccagctatcacacg

SEQ ID NO: 35831 - DNA, 109 bp, Glycine max
  unsure at all n locations
acgctcgcccatgacaacatataggatagactcanacccttagaatgtgtttatttgatactgagcaatggaatcttgcggagcccagtacatagggtagcgataaata

SEQ ID NO: 35832 - DNA, 358 bp, Glycine max
  unsure at all n locations
agcttgtttcttatgacctctacatcattaagtagaggtgaaatatgtgctaaaatctattgngaaaacaggaaaaaaaaacagaagtgaggattgaatggcataaccatgaatccactgacaacactgcatactacacaattgttccaaatgtcttgaccacggatttcctctactgagggtagtcctataagctcaatttgagggttctctagttgtgttgagttcaaagaagcattntcaattcctttaatagagtcatcatccattggtaaagctcacatcanggatatgctagagctatgttatgaagaatgaatagttattataaagcacaaatactcaaaatatctatcta

SEQ ID NO: 35833 - DNA, 463 bp, Glycine max
  unsure at all n locations
gcttgtgtcacgattcactgtgacagtcaaagcgccattttcttagtttatcaccaaatgtaccatgagaggacagagcacatagatgcgaaactacacttcatcagagatgtgattgaatctgagaaggtgaaggtcgataaggtttcaacagaagataacccggctgatatgtttacaaaatccctctctagtgtcaagttcaagcactgcttggacttgataaattttgaggatgcctaaagcacattggtagaagtgcatccctgaatcgcaagataagcacttgttgatttggagtcaaagtggagatttgtggtgtgtgactcanaatcacaaatggcacaagtgggaagactttaagaagtgctatcataactaaattcagttatgataactgaatctgttttggcaccanaacatagctagaatgagtgtgtgtgatatatatatatatatatat

SEQ ID NO: 35834 - DNA, 360 bp, Glycine max
  unsure at all n locations
gtccaaactaatcttcttttaacttctcatcctctagccttcaccacttctctcgcacctctatttcccatctccttccttcctttttcgattccagttgctagtcattataggatctccattggagctcatgcttccaagaagatataacatatgtcaacctatatctaaacatgcaatccaacttcatataaattntttcataaaattagtaaatactcaacaaaatatcatggtggattattcgtacttccattatgatggttcgcttatcctctacgaccaccaaaatgggtagtgagtcatataccacctacatcttcctcactacctnctctctttgatgatcagtaacttatg

SEQ ID NO: 35835 - DNA, 497 bp, Glycine max
  unsure at all n locations
nnnaattacggggaatttgngnagtgcantatgnatactaagctngaatgaggaagtgtgaaaggggaaaactcccaactttaatcctttgttcacaaanggatacctgaagatatgtcgcgggggtcatgagaccttggtgacgtcaggtggggtgctattgcccaaaaccaagcttgaccaatcccgaccccaacccggcatagtcagtcagtgagaacctgtgatgtacctaaacaggcgagctcttggcagtcaaccgattaaagaacatagaccacaaagcaaggatgcttatgtggtggctggccagctgtgaatcttgaatgatatatgggatatggcctctggtaatcgattaccaagggtgggtaatcgattacaaggcttataaacagatcangaagctaagaggcttatggtaatccattacaaggggcgttatcnattacaggcttataaatagaactgaatgttgattgggctcttgtaataan

SEQ ID NO: 35836 - DNA, 236 bp, Glycine max
ccacctatggttgggacatcttccttttgttgcggtgcggtggtattatggggaccatgattgctgtgcttcccaagatcacactgagtgactatatggggaccagccaagaccaaacttttatgcatgtggatattctggatttcaacatggcccaacatataatcagtaacagggacaatggagaactcaccctagtaatcagtcacaagccacaacaacaagggcgtagtctc

SEQ ID NO: 35837 - DNA, 274 bp, Glycine max
  unsure at all n locations
tgtggggataaagtcagcttgttggaaagataagtggttaggggaaggtcctactctntaacagaaatacaatcagttgtttctcattaatagacaacaacccgaccttatntcaatgatgggaaatntctctcaagataactggagatgagacttgaaatggaggaggaatctgtttgatcatgaaagtgatctagctatcaatttcatggaagaaatcagctctatacatattcagaggcatgttaaggacatcatgacttggaaagctgat

SEQ ID NO: 35838 - DNA, 352 bp, Glycine max
  unsure at all n locations
accacacgctaagcctccaaatgcgcgcttaacgcacatccacgataaatctgactttcagctaggcttcttgcactaagcatgcactggcgcgctgagtgtgctgctccaattcttcatacatcttccattcttctgttgatgcatctaanaattctacaaaataaaacaaaacattgttaaagtaccaactttagcattcttaagataaaaactcaaagaaaatctaaattcctatctttntaagtcacaagaagtatctaaagagaagaaattagataatttctatgtaatttaagtgcacaaactaagtatgaataacaattatcaatgaggaatgaagatagaaata

SEQ ID NO: 35839 - DNA, 370 bp, Glycine max
ggagtggattacagaatcacctgaactagccgagccttaaaagatgactggatggaatttactttttgttttcgttggcaatgatgtgaagatgctgatcttcccgtggagtggaccttaatttgaataacactatattatactgatttgcggatcttgagatggacgatgctgaaatgagatgagaagcctgttgattggaagcacttaccaaactgacatggctgataatgtcctgtcccattgaatgaagatatgatgatgacctgcctatacagtattctgtcctgactagtgtaaagctctcacagaggggtcaacaattgtcaattggggagtatataagaattgttaattgggagcctgggaa

SEQ ID NO: 35840 - DNA, 342 bp, Glycine max
  unsure at all n locations
agctntgatnttcatattgaatttcatccaanattntgacaagtcattgttacttccatcaatattgatattgtatcatgcttaattatatgcatttgcttattctgatcattgtctattgtgtgattatttcttccatgcangtacatgattcctatttgttgtgagagtgaaatgatgggcaacagcaacaagtgaagtgaagttatatttcctttntttgtctttatctttgttaagttggtatataatttttattttatatgtttgagttttaaatgtgtaaaacatagaaatagaaaggtctgctgattgcttattaaatacaaagtaggatatttt

SEQ ID NO: 35841 - DNA, 390 bp, Glycine max
  unsure at all n locations
actaattggaggaatgatcaagatgtatttgctgaacaatttaagtcgtctctttttttattatgtaatntgaaagaatgaaacatgtntaagttgctcaattagaacttgaaggaccaccaacatagtatatcagtatcttttttttttgctagacagaatcatatgctacttattgttgggacaacatatatttagatggtactgcattttgggagaaattaaatatgcatgtccttaattcctcatgccaatacctaattttatgattntaattgaatgggtgatttgtttaataatttttaaatatgatatgatccatattngaatttgcttattatttttttttgctagaactgcctttacccattttttaatagtatagaattt

SEQ ID NO: 35842 - DNA, 400 bp, Glycine max
  unsure at all n locations
acaaggatgttgttgtggaacactttgtccggagagtgatgtttgatattaatgaaatcccacacctatattcccctgtcttatctagttgtcataaacaaactattctatatcctactaatcttagagatgcacatatgtaggaagagcataataacccctacgtacgtagcaatatcacatggatgaagcaattaactatatctactaaacaaaagctttctataagaattatcctcacacaccatacgtgcattttcaatttcccaactttaaaatcacctctataaaccctactttacagaactcatcgtatttcacttctatgtgcatatcaacagaactcaacttctcagtcgtgtttgtattgtgacggataccatttgacactcatcatttn

SEQ ID NO: 35843 - DNA, 220 bp, Glycine max
  unsure at all n locations
tagaatctccttttaagtgaaggcatttgacttgatcccatgtgtntactaaagtgaacaanaatcgatgcaaattaaaactctgacatctatcatgggtggaatggatgaatgcatgaagaaatgtatataacacagatgcgatttatgaatacgggagcctgagaaattgtctncttcttagatacaacgtcttggggtaacacagtgctcgacttat

SEQ ID NO: 35844 - DNA, 336 bp, Glycine max
  unsure at all n locations
agctngtgtttatattttatttgcngattgaattctagatacatttgttcatgtattntggtcattcttagcctatcttttgaantttgagtctaattcatgcatgttatttacttcataacatgttctaaatcaatttcgagaagtagtcttgttgttgaactcttttttttgctgtctaagattcttatatgatggctatgatgaacatgaattgtggtgcggagttgtgaatcacataacgcctaagctctcttgaattgtcgtactcacgataatagagcatgctcaaacactaattgtaactattcaagatgaacactactttcgatttct

SEQ ID NO: 35845 - DNA, 185 bp, Glycine max
acaaaccacaaacccttgcgataggtacagatttctgattcaaggccagctgggttaccaagttgaccaacgcatccagtttgccttcaagcttcttagtttcagatgatgcagaatgggttgtagctacctcatgcactcctctaatgactatggcatcatttctggcgctaaactgctgggag

SEQ ID NO: 35846 - DNA, 332 bp, Glycine max
  unsure at all n locations
agcttctacttatgtgttanggcgggcttccttcaccttcttgtctcaaccgcgagctntgactaccgttcttccttcccgcgatgcttctctntatatctgcctgagtgggcttatagtctaacccatacttcccacgatttcctttggcatttatcaggccagttatgccgccgttatctttgcctaaacccattccgggttcgtaaccgttccccaacataactcgggtcatcattactgctgcatcggataggcaagcttgcccagagaaagagtccacggaggaaatgcttaccacctcaaaagactggaaagcagnttctaatgac

SEQ ID NO: 35847 - DNA, 257 bp, Glycine max
agcttcaattttcttgtcaagcgtctcgatatattacgggactgaatctgacattcgaataaaaagctattgtcgtttgaattggctcaaagcttcaacattcaatttcgagggtctcgatatattacgggactcaatccgacatgcgagcaaaaagatattgcagttgaataggctcacacgttcaacaattcaagtgtgagcgtctcgacatgttacgggactcaatcagacatcccggtaaaaagctattgtca

SEQ ID NO: 35848 - DNA, 474 bp, Glycine max
  unsure at all n locations
actatannaaactcacgctctgagacaattcanacgacaacaactntntactcggatatttgattgattcccgttatataacgagacgctcgagagtgaatgtttaagctntgatccaattcanatgacaataaattttttctcagatgtctgattgagtccaataatataacgagacgctcgaaattgaatgttgaagctctaagccaattcaaacgacaataactttntactaggatgtctgattgcgtcccgtaacatatcgagacgctcgaaattgaatggtgaagctctgagacaattgaaacgacaacaactttttactcggatctctgattgaagtccgtaacatatcaagatgctcgaaatngaatgtggaatctctgagccaattcacacgacaaatacgttttactcggatgtctgattgagtcgcgtacatatcgagacgctcgaaattgaaggtagagctct

SEQ ID NO: 35849 - DNA, 321 bp, Glycine max
  unsure at all n locations
agcttcttgtataantatcttggtagtccttatgcctggaccaagaagctagaaacctgcatgggcgttgaaagatatgagcaacactcatacaaacacattaaagataaaatataagactacttattttattaaaacaaacatcttttaacaaataactctaagcaaattggaccaatacgtgataagcgagacggctgtgagatatataacaactctattcgagtcacatagtgttgaaactccaaagtagaagatacatgtgtctgttgatgtgttggcaactatgactactagtattgacgatgagtttgtgatgta

SEQ ID NO: 35850 - DNA, 403 bp, Glycine max
  unsure at all n locations
ctggtatgagttcattctcgtgctgtagtgctgttatttatttgcccttagngaggacatcccctgagataatttatttaatctattgaattccgctttctttcctctttgacccaaataaaacacacattcaactcaatcattcattgcaactagccaactacactgacaaatgacttatgtgtctatacacttcgaaattaaaaaanaagaacttcattgtactgactatatagataaattatatctcaattgtgcctattatctttgagtctaaatatgatatacccgcagcacaacagttttacactgccatttaataatatgttggcagctggcacatcattaaagaagttagacttcctgcataagtggtttgatggtcaaactcttttagtaatct

SEQ ID NO: 35851 - DNA, 244 bp, Glycine max
  unsure at all n locations
gcatnngcnncaagcactagcccccntnnacaccagnaagaaagaaatttttttagggnagggaaggggtaggaaaaanaaaggaaaaaaaaaagaaggaagagggtaatagaatactgaaagaataagtgaaaataaatttaaaaaaaaaagggaaaagataggaagaaagataaaaataaaaaaagagtataaaaaaaaaatgaaagtgtttggaatatgtgaagaaaattaaaattgaaag

SEQ ID NO: 35852 - DNA, 479 bp, Glycine max
  unsure at all n locations
agggcgccccttttncctganagncnnaacncnnnnntntagnacagccngcctggatgcagtagagcggcacgcatgccagccncgacttatgngttttgtgcgggccaacagcaccngcaagggagggccgcntaagcttgactaccgaccttcctttccacgatggttatctatatatctgactgagtgggctccttggctaacccatacttcccacgatttactttggcgtttatcaagccagttatgccgccgttatttttgcctaaacccattccgggttcgtaaccgatccccaacataactcgggtgatcattactgctgcacggataagcagcttgcgcccaaaagagtcaccgaggaatgcgtacccctccaagaccggaagcagctttaatgactgcttgcggggccacatatgcatagagatggctgccacccaacgcatgcttcctgttacatgacaatcccctct

SEQ ID NO: 35853 - DNA, 324 bp, Glycine max
  unsure at all n locations
tgtaatcgattacacacatactgtaatcgattaccagaagatatttttcttataatattctcaacagtcacatctttgtacttgattcttgaatggctgtcaaaggcctatatatgtgtgacttgngacacaaatttgctaagagattttcagaacaaaaaggtcttatcctcttaaaaagcaaaatcngtttatcctcttacaaattccttggctaaaacacttgtgattcaataaggaattanttgagtgctcacattgttcaatctatctctttcaagagagatnncttcttttcttcttcttcattctgaaaagggatta

SEQ ID NO: 35854 - DNA, 282 bp, Glycine max
  unsure at all n locations
agcttctctctgtcgtanaaaagatattatcggccagtgtttgtaaaaaaattgcgcaatgtccgctganaaatatccgtcggggctatttaactaccgatgtcggctattgttttttctattccacccctgaattatatttggatgatgcctattangaaatgttcggtcggggtcatccggtcatgcttctttntgaagcctcgatctgtcgtctttcctagccggccgacgtcggctagcatttttttcgatcaatatctgtgtgaatcatggtttttt

SEQ ID NO: 35855 - DNA, 279 bp, Glycine max
  unsure at all n locations
gcttatgagagagtcaagatcaattgagaggaaaattattctatgctaaacaagccaacaaagggagagagaaggttgtcttcgaacccggagattgngtttgggtgcacatgagaaaagaaaggtntccggaacanaggaaatcaaagcttcaaccaaggggagatggaccatttcaagtgcttgaaagaatcaatgacaatgcttacaaagttgagctgccccgtgagtataatgttagttccaccttcaatgtctctgatatatctctttttgatg

SEQ ID NO: 35856 - DNA, 785 bp, Glycine max
  unsure at all n locations
attcacgcaatctgcatcacattctcgganaggtctacattttacaccttaactactaatcatgagagaggananntgataccttcgaatgtccccgcaacatanagtaaangcaccgcgcgtangtgaaatgcacacagctcaacatgcacacatcaagaatttccttgttgtagcnactcatcagagcgggaagcaggagcgggtatctatacacttaatcactctactgctacttcgtctcgtcatntngacaacntggcattacgatagaatatcgattctacgtctaatacataaatccacagctcgagtgcagcctactctgaatatcgcgtatcagcaacctatatacccgagaatgaaatcgtcgcntgatacagtgtattcagccgaatcnaatacgatgagatcgcatcagtctcagatgcatttaaatctgaactcgtacncgattcttatcanacactgtgtacatgtcaatcactcgtaactcacatgcttactagcgataatacgctactctatctaaatctccatcggtctaggtcccactactctgactgcgataagatggaatctgtcatatacatccatctgcactcttacaactgatatgtaccccccgtctattgccacangctatatagtcacgtaaacatgctgacagacattagcttctacgtgtaacccacactatcgaacatctaaatactgcacgtcgctcgcgttagcaattgacatcatgcgcgtgtctaccacacntgcataacaacgaaatcgcg

SEQ ID NO: 35857 - DNA, 349 bp, Glycine max
  unsure at all n locations
tgcaagctattcaattcattctatgtactcgtggtggtccacattttgtgtgatgtatgtttattctcgtttgcatttactttttatacccccttttgacgtgcttaagccatttatttaagtcatttctcgcttaatctaaaaataagataaatttccaccgatcgtttgaattgtatcatccgttaattgtggttaaaatgaattccgaccgtttggtcgtgccgtaaccacgttggaaatcaaaaaaagaggtaaaataataatataataatcaaagaataccttttagtaaaataaaagcgaaagatcaatcggacgttntctctttgggatgtctcattcttaa

SEQ ID NO: 35858 - DNA, 454 bp, Glycine max
  unsure at all n locations
agcttgtangattatggtgtacccatcacatgtggtactaggtggcggtcgggcgatggtgcacaacaagtnttccacatccacanattgtgcataaacccaccatcccctattgcccacctccaactgagctcacgtactcccacgtagcccatatcctcgtttctctcaacaccgggtccccatcaatcctctcaagcttccccaacatccaagtaaaacaacattcaaacaacacaaactatcacagccaagaaaacagagcataggcagataactctgccataacaccaaccaatatcacagcttttctcacttatagaccccagtaacaattcctttgttccaattcgttaaccgttagatcgactccaaaatttactggaagctctagtacataagcctcattntgaccgttggatctatagcaacatcagaactcattctgactgtc

SEQ ID NO: 35859 - DNA, 444 bp, Glycine max
  unsure at all n locations
agcttcanacctcattatcacanaatctaggtgtccaaaacccctcaatttaatggattntctaggctntagaagtgaaattgagaatgagacnaatttgaagcaaactctcacctcacacaagtctataacatcaatttagacttgttcaaactggatttacgcttaanatttcaccgaatcaaaatttgactcttcgacacccaaatttgccctagaaatggctctntgttcactttgatcatttgtttttctccctagctcagcctaaccttcctctcatgttctaaatggcatttcaagctaggattaactcactctaacctccaaataccacataatccagatttagccttccaactctcanagcctcacttcttttcactcataacaccacattctcaccttctaaccctaggttaactctacctttcatctctaaca

SEQ ID NO: 35860 - DNA, 536 bp, Glycine max
  unsure at all n locations
cgcacccgtacacacaatgaacgacgctgaaangcacacacacatactacaanncttaaaaanaaaaaaggaggggnnctcgangctatnagtacagcnnaannnnacnnagnaccngncgagccngcagagncgaccagcaggcaggcaagcannnannaagtcttctatattacaacccgcacgagttcaagagaggaggagtaaagaacatgaggactaaaaacaacggaaacgatgtggcatcctttactaaaagaaagattaggtccgcactgtgacaataaggctcgaactcagacaaagaaacagtgttggcctccgtaagtcaagatcaacgccgccaagtctaggacatctaaaagtagccaaaaagaaactcggaagataatgtggggacacgaaccggaaaataatacgacaacaagttgagctaaaaaaattgccgcacgggcgctagccgagtcaaacaatccaccaaagagcagggaccacaaacacatgaaaaccagaacgaggcaccaaaacaacaacct

SEQ ID NO: 35861 - DNA, 379 bp, Glycine max
  unsure at all n locations
agcttctcctttaattntctataaatagggggagaagtgaagtgaanaagggttcanccccttatgcacttctctctctttcgaatttgcttggaaaaattgtttccgtaaagaaaatccaagccgaggcgcttccgaaatgttttcgtaacatttccgtgaggaatttcgcgaaggtttcgaccgttcttcgacgttcttcattcgttcttcatcgttcttcgatcttcaaaagggtaagtacctcgaaccaagctnttcgattcattctatgtatccgtggtggtccacattgtgtttcgtgtatttttattctcttttcatttactttctatacccccttttgacgtgcttaagccactttatttaagtcatttct

SEQ ID NO: 35862 - DNA, 144 bp, Glycine max
tagaccgggtccttaagacactgcagctgcagctttttttgatttaatgacagccacaggggggaagcttataaccataacctttacttaacaatctaagatcttttaaacagattgactacaaatgaatctcattacaacctc

SEQ ID NO: 35863 - DNA, 407 bp, Glycine max
  unsure at all n locations
acgacaataactgtctactcggatgtgtaattgagtcccgtaatatatcgagacgctcganattgaatgttgaacctatgagccaatncaaacgacaataactttttactcggatgtctgattgagtcccataatatatcgagacgctcgaaattgaatgttgaacctctgatccaattccaacgacaatcactttttactccgatgtccgattcagtggtgtaatatatcgggacgctcgacattgaatgttgaacttctgagccaattcaaacgacaataactttttactctgatgtatgatcgaatcccgaaatatatcgagacgctcgaaattgaatgttgaacctctgatccatttcaacgacaataacttttactcgatgtccgattatagacgaattatc

SEQ ID NO: 35864 - DNA, 440 bp, Glycine max
  unsure at all n locations
gcgtattgagctagcgtcacggcaannagtagccccggatccttaagcacctgcagctgcaaccattttttcttaatcaccacgacaacacggggctacatgctgatgctcaccgaagttctactggcaaacctcctctaatactttatttctagacaccaactactagcctacattggattacgaacccaacataagaccttcattgcaagcgggtattgcatattacacatactccatggggtttatactacaaaagttgaatgcgttaaggagcattctataacaaaagttctcttatatggataaaatacgggacacatattccaaaacgaagccaactactgcaggggctgctcatgtagacgccttggtcaccagaacaaatgtcataaccctatcaaacggaatcttcatgctctttaaacgaaagattttcg

SEQ ID NO: 35865 - DNA, 362 bp, Glycine max
  unsure at all n locations
agctttgtttgtatntaaacgacaataactttntactcggatgtctgattgagtcccgtaatatatcgagaccgtcgaaattgaatgttgaagctctgagccaattcaaacgacaataacgttttactcggatgtctgattgagtcccgtcatataccgagaagctcgaaattgaatgttgaagctccgagccaatctaaacgacaataactttttactcggatgtctgattgagtcccgtaatatatcgagaccctcgaaattgaatgttgaagctctgagccaattcaaacgataataaacttttactcggatgtctgatagagtcccgtcatatatcgagacgctcgaaatcgaatgtt

SEQ ID NO: 35866 - DNA, 324 bp, Glycine max
agttctataattctctctgacaaatcaaccatcgtactacaatattcttgcagcgtctcactattcagaacatagaaagaactaagactattcttgctgaaggatataatacgcatcatagaataacatatcaatgtgaacattgtctacgaagcacggactctgatataccaacacttcgatataggtaatgtctaatatataggacacacagacgctgcatacacacacaaatagagagatcctacttacatgaaatataaataacatataacaaaatatcgaaattggtggtatattaatctttttaaaccaaccttctat

SEQ ID NO: 35867 - DNA, 448 bp, Glycine max
  unsure at all n locations
agctntttaacatttatttcatattatgggaccgtctttgactaatctaagattaaagaggtaaagcaaagaaccgaaatttgcagcatctttcatagaattaattaccaataggaacagtgaattttggaaatgcagtgtacaacaaactctatatgtttttgtaaaatagtagtaggctatatntatttttgtaaattacacttccaatntgaatagacatctacaatagtaaaatactaattaaagcttaatataatctttttcaatcatccacttgatgctccagaagttagagtcacatttgtaagcccaataagcccatccaaatttggcacgagagtatacatccacttggacttgcgtaaanttttgttggtctttctttgatgcattatgaactttccaatcactactccattccgctgcgagattcaccaacaacatg

SEQ ID NO: 35868 - DNA, 370 bp, Glycine max
  unsure at all n locations
agcttgtgttgttcttacgaatgatgacatggtcaattgaactctcagaatatgatattgcctacaagctgagaggtactatccgagcccaagtactagccaacttcattaatgaattccatcccccaccaccatatttcaagtaggaatggtggacgatgcatgtgtaaaactcttccaataggcacgggagtggtgttggggttattctcgaaggaccatggtacaatccttacattntggattcaaagccacatgcaattaggccgaatacgaagaactctttgcaggtttaaggctttccaaacaggttgatgctcaaagggtccggtgtcgaagcgactccaagatcgccgttgagtatatcaac

SEQ ID NO: 35869 - DNA, 319 bp, Glycine max
  unsure at all n locations
agcttgacattgttagatacatcttcttcacctttgcattcttgctccattcattgaagccatatccacttgcaattccaagtgtcaaacctctcaccaacaaaggtttgaagaccatcaaacttttccaaaatctttgaatgaagagatgaatcttctccctcatgtccttcttccccaacatttctagcacccttctttatccaagagccatcatgctccttaatataaccaaaggatgctatgactgaagcgcatataaggaatgatctcttgattggaacatanggttcataatcatgacgtatgttgaagtgtt

SEQ ID NO: 35870 - DNA, 319 bp, Glycine max
tgcaagctaacatttttttactttgcgcatccacacctcgacagcgtggagtaccgctcagagtgacgcgtggtgcccataccccctcaattaattcgcgccattccgctccttccgacacctcaacacgggctccacattagtggaattcccaaattgcccttttccaattcttacattgtctacgagtcataattgtattgagcatcacactcacttttatcacaatctgcatgcaccatgcaaaacccagaccctatatatctatgccctaaccatctcaacacagaaccttaataatctataccataatcttcat

SEQ ID NO: 35871 - DNA, 492 bp, Glycine max
  unsure at all n locations
gagctctagccctgaaacacanaaaaagaacgcgggggaagagacgcgcagcgcagcagttttataacaaaccacacccaggcgagaaaaaaggacccccccacagacggaagacacaaagagccgaggggaacccagacaggagaacccaaaacacagaccccaacccgacaccgccacacaaacccacgaagccgagagggccgaccagcgcgagaggcgccggcacgaaccagcaaaaagggcgggaaccacnaaacacgcaaggcggagggacacgcgacaagcccgcgacgaggcncacgaaaccaaaggcggcaaagcgcgcggaaccggaccaacgggcgaacggcacacgaacagaaacgcggcaacaaccgcacgaaacacacccaacgggaccccggaggagagcgccaacccaacgagcgagaccacagcagaaggccacagcgcgcaccccgacggcaccacaagaccaagaacngnacg

SEQ ID NO: 35872 - DNA, 292 bp, Glycine max
  unsure at all n locations
agtaagcgaagtgataatgaaagcatacaaaacacgaatggaccactgagggtgcataaaatgaactgaaagattcgattttgagaacttataggttgaagaccgaagaacaacgaagaactttcacagaatcactcacgaaaacgtctcggaagcgttacggaagcacctcggcttgaattattctcctttttcttcttctcctcactaattttaagtgattcctgagtntctagggtgctatgccccttccctcagcctccaatgccctttaaataacaaaatatgggga

SEQ ID NO: 35873 - DNA, 384 bp, Glycine max
  unsure at all n locations
agcgtgtttgatgntatttaccatcaaccngnatacagggcgtggtggctatgtatagtatgacggaatggaactatgatcttacatcgtattaataggcacgtgttgtttgaacataaaagcacgataagaacacttctctttgaatggttggccttcacaaagtacaacacaacaatgccttacatataagacgaatgtgttgctacaaaaagatccaatatcataacgaacatgcatgtgacactacctcatactgatgaggatcttgacactaactcaccgtatgaatacagtattatacacaagctacacctttaagacgatatcatgttatccactggcaatcacacatacttagggtccatcanaagatacatgtta

SEQ ID NO: 35874 - DNA, 87 bp, Glycine max
tggcgttaaaaatttctctccgccctgacactcatcgcagaactatgtaattatctaacatctctgcgacatggaaccatacagacg

SEQ ID NO: 35875 - DNA, 412 bp, Glycine max
  unsure at all n locations
agcttctgttgtgnacatnttgacttgctntccaatctgacagtcaccacagattctgccttcttctattttcagattgcggatgcctttaacagcacctttgtcaatgattttcttcatgcctcttaagtgcagatgtccaaatctttgatgccatattctgacttcatcttctttggaggatagacatgtggaggagtagctggtttcttggggtgtccataagtaacaattgtcctttgatctgctgcccttcattagaacttcactcttctcatttgtcaccaagcattctgactttgtgaagtttacattgaacccttcatcacacagctgactgatgctgatccaagttgcagtcagtcccttcaccagcagtactttgttcagactangaagtccatcatgaact

SEQ ID NO: 35876 - DNA, 441 bp, Glycine max
  unsure at all n locations
agcangtttctgccatcagaaccatctcattctcaactgaggcgtgttggagcagatatcccagccaagtgagtgctttgctacatcagaaagnttgaatgtgatcttctgatcatctatgcccatttacagattacctcttcccatatccgccacacaattggcggttcgcatgataggacatacccaaattagagggatctcagcatcctcattaatgtcgcatgatcacaaagtccgcacggaaagtgaactgtcacaccttgaccaaacatctaccaccacgccataaagcctagtaatggaacgatctgccagctgcaatgtcattcttgttggataattttcagctctccaagtcttgtggacatggagagcgacatctaattaatgctagcttccanatcaatgagagctgttccaactgacaccgcaccaata

SEQ ID NO: 35877 - DNA, 383 bp, Glycine max
  unsure at all n locations
agctttattcttttacaaaaatgaagctaaactntaaacaagaatgaagcttcgataccacttgttagacaagtggcctcagatatcttaagaaggggggttgaattaagatattacaaactattttcccaattaaaattctactttgattntaatgcaagttcaaagttcccttaaagattaatttctaaatgatgattcaaaataaccaaactgaatgtaaaagtaaagcaacaataaataaaagagtttaagggaagagagagtgcaaactcagttttatactggttcggccacacccttgtgcctacgtccagtccccaagcaacccacttgagagttccactaacttgcanaaaccctttacaagttctgaaccacac

SEQ ID NO: 35878 - DNA, 439 bp, Glycine max
agcttctaatctttgtacaagaatgaagctctgataccacttgttagacaagtggcctcagatatcttaagaagggggggttgaattaagatattccaaacttttctcctaattaaaaatctatcttactttctacttaagttatgaattcccttaatgacaatcttcttaaatattaattcacatgaagcaacttgaattatgaatataaagcaataataaataaaggagattaagggaagagaaaatgcaaactcacttttatactggttctgccacacccttgtgcctacgtccagtccccaagcaacccgcttgagagttccactaacttgtaaattccttttacaagttctaaacacacaacgacgaacccttctttgtgtttagagattctgtacaacaagagactcacagtctcttaatcccttatagaatg

SEQ ID NO: 35879 - DNA, 376 bp, Glycine max
  unsure at all n locations
atcttaatctattaagaccatattatcccgctaaaatggcccattaagtgtgattggaaacatacgcacatgcaaatttcatgtgttttagttaacaacaacttagttatctttagtcttgtctaagcaatatgacagatacatgagtgtctaaagaagatccaagcccataaaaccttgaagttttagagaataataaagaatgagagagtttatatggctnttagacatatgtgataaggaacagaggaagcttgtggttgttccttaagcttctataatgattgaagattgaanaattagcaactgtcataacttcgtaccccattgtccagaggctcttacctatgcgaatgtatgggggagggatgatgta

SEQ ID NO: 35880 - DNA, 406 bp, Glycine max
agcttcatctgatgtatcatatgctgaagaacaaagttgacattacctttcaggcgaacagaatatatatcaccccaacaaaaaaatgagagaaaaaaaccaatataacttttttttgctgaaatcagactcgaatgcatctatgctagtccaccgtagtgactacccacattatatgaatcatattcctatccagtaagaacatatcagcttcttcattggttcaatccggaatctttcgacgaggacccgcagtttcgtatccacaaggcagtgtatttctaaaatgcacttattaacatatttcagttttgttcagaatgtgtagagacttgcacacctatcactttggtgtcatgctttcttttacttcgactgcaacgcgatctagaatattttgtctttg

SEQ ID NO: 35881 - DNA, 303 bp, Glycine max
tggcaccacccagctcacgagttttatgagcagaagcgaatccgttggattaaggggggcagatatctcgattttccatctgataactccatcaagttgagcttttcagaaaattcagaactatgagcagcaaccagttggatgcccttttcaaaacttgtctttgggggctctataaaatgtagactatcaattgtttgaggctttgaatgtctcggacttaacacatatggagaacacttgcgtgtggccatctgacatggaattgagctgcggttctgatgcgatcatccttgctttttt

SEQ ID NO: 35882 - DNA, 265 bp, Glycine max
gaaaagttctttcagaaatatgattctggaataacccacaccttgcacataccatatataaaacatatttggttagttctaatatataattaatgcttttgctacactcaaagaagtctaatccctacctactctaaaagaattcatgagaatcatagcttttcgacaatcttatatgtattcattacctatcaaacacgaaaatcatgacatttcgctgtaacattcttgagagcatgtaaagatattcagctatgaaacatct

SEQ ID NO: 35883 - DNA, 352 bp, Glycine max
  unsure at all n locations
ctgaaattnctctatagataaggagcagatatggtcagaccagaccaacctccttcacaatacagtgtttctgatatttntgactcagaaatttccattcatctcattggaaaagtccaacccacatttcactgtatattagattcaacttcttgatatcatgtgctaacgaagcacaagatttagactcatgatattgagttcgggatactcagaaatttaatctacaatgggcatcttgttgaataaaaagcacgctaaaattaacatgaacaaaatcatgccaataataactatagaacattagacaacactgacaaacttagtcgcattagccactaattgaataaca

SEQ ID NO: 35884 - DNA, 254 bp, Glycine max
  unsure at all n locations
aacaaaaagaaggagaaaaaaatnnannaggggcagcgaccanaanncgggnnanangggagaggatttgggggaagaagggagaatggaaaagaagacaggggggaacgaggagggataaaaagaaaaggggaagagagagagaaagaagagagggaaggaaggaaaaaagatagaatgggagagagaaaaagagaagagaaaaagagaaaatagaaaggggagaggagaagaaggagaggataggaaggaac

SEQ ID NO: 35885 - DNA, 448 bp, Glycine max
  unsure at all n locations
agctctattttttcaatgaagcttctcaaggaggtgagctgagttttcatatgggtgtgtgtanctaaactctagcttctcaaggaagttttctcacagaagcttctctaggaagttttttcaagaaagcttcttaaggaagctacctactctataaatagaagtatgtgtaacacttgttgtaactttgatgaatgagagtcttgtgagacacaactcatagttcaacttctctccctttttcttccttcaatttcgtgctcccccctctctctatctctgcctctatctttttctccattgaagcatcctctccaagcttcttatccaaggctcatcttggtggtgaagctccctcttccatggcttatctcctagtggatgacgcctcctctgacctcttctactttgtcgtccgatgcatctccatggtggaaaatcaccattg

SEQ ID NO: 35886 - DNA, 422 bp, Glycine max
  unsure at all n locations
agctntatttgttattttctcctgccaccattcaaaaattgtaaatgtatccttttccacggagcacaatagaatgatgattttgctgaattaaagtgtgtgacaaacattttacaatgaaattaagactttattgtaaaatatataattaaatcaatttcgttgttttgtttttttcatcttcactaatatgctggaattgtgattatatattacatcttcggttgtgaaanaagtaaagaatagaattactattacattatataaggcgactaaatataacatgtacaatagaaatacaatttttgttgtacaatgtacaacagaattatatttttattgtgcatcgtttattagcaaagaaatatataaatctttcactaaataaaattgagattatctgttatacaatagaatcttga

SEQ ID NO: 35887 - DNA, 457 bp, Glycine max
  unsure at all n locations
agcnngacttacactatacatggcaagttcaacatgcgtggcgcaaatttcttcacaaataactatcctgaagcagaaacctagctaaactacccatcatatctccctaaacccaatacccacaaaaatcaagtgagaaagaagtctacccaaacctgaaatttcaaagtctcacacatagagatgtgcttcacaactccgaanatgccttcctttcgcgatttggagcagaaatggtgactaaaggttggagctntaatggaggcttcaatggagaggaagaagaagagaatggaaacgtgagagagagagagagaaaaaggcttctgaacatttggggctgagtgaggagagagaatacaactntcatctactattatacaaacaaagccctgacattggctgtaggaccacagtgtcatgctgtggtgcttcaattcccgcccaaaaatatcac

SEQ ID NO: 35888 - DNA, 400 bp, Glycine max
  unsure at all n locations
agctanntttactgtagcgactntatcttcttccagagacggcacacagtgcttctggaatcctcacgtttaatcctcaatagaatagtatactctatagttttaactcacacagtgcatgcaaaaatgctactgtttcatagttccagttagtcacgggttacgaaggaaaacgaaattcataggagagaaaatgaaaaaagcaataatcaaaagcttggtggtttaatagccttacctcaaaagtcaaaacctttcaagcgttattcttcctttcattaactctctcgcttggcacaactttgtggtttttccctcagatcttatgttatttctttattcctaacagcacgcatccatcgttgaggttgattccagcgatggtgcagatcttatggtt

SEQ ID NO: 35889 - DNA, 349 bp, Glycine max
  unsure at all n locations
agcttgtctatatatgtccatgaaagacaaggcggccgaaggaactagttccgccccggagtacgacagtcaccgctttatgagcgttgtacaccagcagcgcttcgaagccatcaagggatggtcgcttctccgggagcgacgcgtccagctcatggacgacgagtatactgatcttcaggaggaaataaggcaccggcggtgggcaccactggttactcctatggccaagtttgatccaaaaatagtacttgaattntatgccaatgcttggccaacagacgagggcgtgcgtgacatgagatcctgcgttagaggtcagaggatcccgttcgatgccgacgctatc

SEQ ID NO: 35890 - DNA, 446 bp, Glycine max
  unsure at all n locations
agtcttattatattatttcattcctatagaatttgtattcaccaaaactcttattangtgagttactcggaaggaaaaagaaactatattcttgctctatcgagcttttgctttcattattctatttatcatatacttcattgatttttggtttctagttcattctatttgcaatccatcactgcttgagattgatccagtatgtggctggtacccgcaatgtccttttactctttctaccacttgttttgtaatttttgtttaacgaacatgctttttatagaaactgattatnttntgtgtattntgttgtttcagctgtgtatcctaacaagagacacaagaaaaactacatttctttgtgttcttatacaaagaaattaatttccatgaaatcaatgacatacaaaatagaataacaaaggaagcaccagtgatgaagcaat

SEQ ID NO: 35891 - DNA, 401 bp, Glycine max
agtctttttctctatgcgcatatatggattcgtccagtacttgataacagcttatgcatccaaagcgctacacaattgacctggccgaaaatcttttataaaaatattcatcagcgtccaacacatctttttgtccaactcgctaacaaaacttgtggaaatattttatactttcatttaagatttcttcatccaaaaatgaacacttgatatagttcttttctctatgttgttcgaatgctaaggtttatttgtgcttacattcttcattgtatgaaccttagtctgatattcctttttgtttttttcaaatatgctctaatgtttaaatttcaaacatgaaaataaaaaaattgtaaatataagcacaacctctgatcaaacataaagctacacaacga

SEQ ID NO: 35892 - DNA, 304 bp, Glycine max
  unsure at all n locations
agcttcttcatttattctgctcctccgaaccacaacctcttgtgcctcttccttttcttcctcttggatcagatccatgtaccttcgacgctttgtcatgaccggagccggtggagtcagaggggaagcagctcttttggatctgcgaagatcggagcgggccggtgggcttgggcttcnggcctggatcttctcgcgctgggagcggagcctttcgacgttgccttcgattttgccctggaggcggaggcgcttganactgaggccgcccatggaccagtgggcctcttcggcccatgacatg

SEQ ID NO: 35893 - DNA, 403 bp, Glycine max
  unsure at all n locations
agcttgatcattactttatctaaacattccaatccactcaatgtatacaatttctcattcaagtcattaacaaacactcattcataagaattcacaccacagaatatcataatcaatcagttcactgttcaaacaagctntntgtacaagcaatcaacactaaaataactggaatttaaatgactgaaacataaactaaataactgataaaataaattgttcataatttgcaggattntaaaaactatgcagaatttaaaactcctgatcatcctactgctgatcttctgcatgctcgttcaaatccagcacctgagcagtaggctcctgagctgctgcttcctcctgagcgactagatcagtctcaaagacaaatggctcaggaggagcaagctcatcctct

SEQ ID NO: 35894 - DNA, 417 bp, Glycine max
  unsure at all n locations
agcttggtttcttttctaggattntggaatcgattaccagtgacaagntttgaacaaaaatcacaagatgtaactcttccaatggttttcaaggttttctaaaggttataactcttccaatggttttcttgaccagacttgaagagtctataaaagcaagaccttgatttgcatttgaataacacttactactttacaaacaacttttccacatattcttttacaacctttgaatctctttgaacatcttcttgaacttcttcttcttcttcttcctttgcaaaagctttctatagttttctggttttccaaaccttcgaaacaaaagtgtgttattcatctttttcattctcttcntcctttgccannaagatttgccaaggactaaccgtctgaattctattgtgtctctcttct

SEQ ID NO: 35895 - DNA, 338 bp, Glycine max
  unsure at all n locations
agctntatggactattatgataacctangcaaagtttcatttagggtccttttacacgacccacatgtagctgggaacactntagcctcaacagaacaggtataatacaaacaactatagtagctccatggatccttcaccaagacttcatcaacagtcccaacaatcaaacagtataaatcctggtttgacaaanaacaattgtaatatattagcacacatgtgcacaaattagatattggttaataacaaaagaatgaaatggaacttgacctgtgtcaatggttttatctcacctagcctcaccacttttgcattacgtaaaaatctaccaagtg

SEQ ID NO: 35896 - DNA, 457 bp, Glycine max
  unsure at all n locations
agctntaacattgatacaactttacccacgggagatttatagagtggttcatacttaaagactgcaaaccctctanatcaaaccatgcaaaaagaanacacttcaaagataaaagtcanattgagtaaatcatgtcttatctacaaggtttctaccattagcattcttttccaagttgatgtatattagtacttgaaagagaaagttacaatcacttacagggaacaaatgcaatctctaatntgttgaaaccttgagacatcctttttgtaggttgtaaagttcaaatttataaaaacaaatttgaagcaaagtggatgaatttcagcaactataatagtgaataagttactacaagacagaagaaacaaatgtacaaagacttggttacatgtgcgcatgtgctataccagaaatagaaagtacttgngaagaacctgaatctaattccaatctt

SEQ ID NO: 35897 - DNA, 300 bp, Glycine max
  unsure at all n locations
agcggtatctggaacggaacagnaggcggtcaaagcccgcgcgcaccttatatccctgcagcacaggggggaactacgggacaaccgaccaacgcaggggaacgacagaacggagaaaaacacggggaaaacgcccagagaaaggacgcccccccaaccggccacgcaagtcaccatctcccggccagatgaccagccccgccaggcacagcccgagaaggcgacggacgtccccccacccacacgtcctaacaagcacaggacccaagcacagcaggccaaggcgcacaagaggcgcac

SEQ ID NO: 35898 - DNA, 453 bp, Glycine max
  unsure at all n locations
agcttatttgttcctttttctgcgaagacaaacgtttggagagatgatttactaggaaatgctattttacagaaataatgacatagtaatcttttcgacttataacaaacttgtgcacacatttccctgaagaagaacatttatgaacgtgcatacgcgcaaaatatactgctatctatatcaatatacaaggatattcaaaacattctagctacctatatcccacacatattcttttgacaagaattcatatatgcatgctgaaggtatagtgccagaattacatatgtccgtattcaaagcattctgctaccanaaagtacatacgcacatgcaaggtattttactacctaaattatcatacaaattaatataggttgttgttgttggctcattcacatatattgtatacatatatgcacatgcgagagccaatttcatgttatggacaca

SEQ ID NO: 35899 - DNA, 335 bp, Glycine max
  unsure at all n locations
aacactagacccggatcttaagcacctgctgcatgcacngtttttgccaaatcatcagcctttccatgattgataaataatgttccttgctttatcatatgagtatgggtctccccaaaatttatctctggttatggggctgcgaattagtgatgattgcactcgaatgactgatttacttgcgaaacatacaagaacggacacatacttacattcatacatgatcagactcaatatcaaaaatacgatcttcctctgtacctgaaactgatatgattttctatttactcgattcacaaggaatagtatttattaccaacacctttctatatact

SEQ ID NO: 35900 - DNA, 87 bp, Glycine max
atgacgatgaaatcgaagtgcacattgacagtgtggatgctgagactctctgggagcttgatatatttgttaccaactataagaaaa

SEQ ID NO: 35901 - DNA, 198 bp, Glycine max
agctcgatatttttttgacagcacactatcaatagagaggtgagtggataatcaatggataatagaacggatcgcgcattttgctaactctcttatattccttagctcaacactaaacagtggattacttgcttgtatctcacgattgaagagccatgcacagagactcctcctgcatgactatgtggcataataacc

SEQ ID NO: 35902 - DNA, 539 bp, Glycine max
  unsure at all n locations
agactctactgaaactagacatagcaanacngggaantnagctcgcacccgggatactctgagttgacctgcggcatgcaagtcttttctatcttgtgntagagacgngcattaggaagatgatatgatagaaaagagcaattataatcaatcgaagattaaagaatggataatagataagacgaacagggggttctttggaccatacaatatctgaactacgtgcataattgcgcacagagaatactgttatagataagtattgataacttggttggacccttggggtgtacatatatcacctgtatcagttactaactgaatatttgtgtactctgctgtaccgcgtcgaaccaaatataatatgaaactgatagggagatgtcactacatccaaagccatattcccacctaaatgttacctcatactgccctatcgatccatgatgattatgcntattatctttgattcgatgggatatgactagccaagtcagtccatgacatgtctatagtccggaattacgatgacatacttg

SEQ ID NO: 35903 - DNA, 454 bp, Glycine max
  unsure at all n locations
agcttatctcttttcttgaaccctgtggacctgtagaactctgtccacctttntcctatcttgacataatttggtctttgtttgtcaaagagcattntacacctatccacccttccataaccatttgtcaagtgtagctgattgatgttcttttgacgaacaatatattaaaatctttatgcaagttcgatagaatttgaaaataaacaaaacaaaaaatacacatcaaaattattgtcaaagaaagtacagtgcatacaaatgcatgatttacaatagcaacaaccacataattaataacattagtaaagttaaggatggngactcacaagatactgattattgtgtctttagtcaaaatttctctgaattntgtcatttaatccacaccaaaaattttcaattaaactgaaattcactaaattgcttaatttggataacaactataataact

SEQ ID NO: 35904 - DNA, 459 bp, Glycine max
  unsure at all n locations
agcttgcttattatattcctatcatgctctagctatatcaccggnatatgtttcgactctagctatcatgtcttggctagtagatacatgattctcatggtttaccctatagtctcttataacagcagaagtccactattctatgtaatttggaagtaattaagggtcaatactccatatgtntaataggagagaaggcatattaaacactggccaatgtctaanaatagagtcattgtcttcatcaatgtcttcagaatctgtttcattgtttatgaaacttcgtgcttgacacttcttatattcttcccactntttgattgctntaagaagttcttgggaaagaacaattttttctgaaaaagaaatttcagttttgttgggctccttataggggatatatgactcanaatatgaacagtgccataaatcatcatgacatcctagagggtctatatc

SEQ ID NO: 35905 - DNA, 450 bp, Glycine max
  unsure at all n locations
agcttcttggttaatatttcttaccacttcaacatgtcattcgaagtcaaaacctaagggtggtacttgggaagattangggtggcaatgtaagccttggccggacgagttgggctagatgactcaacccgctagcccatattgactcaccccgcctaacccaccaacctagcgggacaggttggctagccagccatccatacatacatatacatatatatacaaataggtgttttgtcttacttgtcactttgtatcttttaagtttatagtgctattcaaaaatcacaatatatatgtgctatcatctttatattattttataaatttaattcctttaatacaaatagacaaatttatattaaaattaaatctaggataaacaattaatatattntatgttctctagataaatctgttcatttgggataactttatagaataagatga

SEQ ID NO: 35906 - DNA, 601 bp, Glycine max
  unsure at all n locations
aagcacccgggactaacacgaccgcagcattgcaggttacatatannatattaannnnaannaaaaaaaaaaaagagganagttgacactgagcccctcgncanaccccannaannnnannnangnnncnggngagnnnananagangaanggaaggnagggagaggattattttattggaagaaaagagagagagagtggaggagggtgaaatagaatgaataaaggaaggagagaggtggaggtatgaaaagagaatgataagaatatgatagatgaaagtaagaagaagtgaagtgtaggggattggatgagagattgaggaacaatgagaagaaaagtatatagaagtaggagagaaagtgagaatgaaaaaanttgtaagagaaggtgaagatagggaaagacaaagaatagaggaataaaatgaatgagttagaataggagaacgtagataatgagtaacataagaagaagagaagatgcggagacaaagacgaggaaattggggnatagaggaaattacccaaccacgcaattgccccgcacacaggcttaacaaaccgaagcacggccgccacagggccaacacaaggaaccg

SEQ ID NO: 35907 - DNA, 245 bp, Glycine max
  unsure at all n locations
acgcaaaaaagaagcaatcaaaaaagggattgctgccanacgccggcaaacggcgccgatttgacgggaggacgagaagcggaccaaaaaggaaaaggaggaaggacaagacggccaaagaggccaacgcaacaaaaaaggacaaaagaaaagaaaaaagaagaagaaaacaaaaacaaaagagaaacagacacaagccccaaaaacacgagggaagcaaangaaaaaacaggacgacggacaac

SEQ ID NO: 35908 - DNA, 383 bp, Glycine max
  unsure at all n locations
gaaagatgtaagatcagagcacgagtgcaagagaatagactcaaagcacacatagaanaatgcataagagcacaagggtatgcacaagcacatgagagtaaaagcttcatggtataaagaaacttcatgagcctttgtttttaagctaaaattcgtattgctcgcttagcgcacagccgcccttatcgagtcaatataacgattggttttaacaaagccttgtgcttagcccaacctcgcgctaagcccaattccaaattttcaaatcccagagagttttggggcttagtgcagtangcctgcgcttatcactgtctgcaactcaaaattttctgcaatcgcgcttacatgtatgtangctagcgctaatcagctctactaca

SEQ ID NO: 35909 - DNA, 625 bp, Glycine max
  unsure at all n locations
gaccgacagccaccactaanattgangatacgagtcataactacagtcttantataaaaaanannaaaaannnnnnaagaggaacgaaaactgatcctcngtatnaccnccnannanaannnannnngnccnnggnngannannaanaananannngnaggaaagcaagannattttatagngnnanannaaaaannaggagaaaggaagggaatagnagaggaaggagagaaaaaagtataaggtaaaaattgaaaataagaaacgagcaggaagcataaagtgaaaagacccgggtgcccaatgagagagctaactcacaacaatagacgcgcgctcactgaccgctatacaatcgagaaaccagtcacgccagctgcatgaatgaataggccaacgcgaaccccttgcggccgcccagacccggaaccaaagctcatgtacgacaagcgaacaacaaagttatgccatgcatccgatgagaacacttattcaagcgtagcaaccagaacgctaagggcaccaatactgccttatagaaatacgcccacacctgccaatcaatcgaaaacagatggaatgcgtacaacatactgccgacacggaaaacatcacaaactgaccg

SEQ ID NO: 35910 - DNA, 629 bp, Glycine max
  unsure at all n locations
acgcgagcagagaaccactcgtagaccgagtacaaagtagcatanacccaaattttaaaannaaaaaaaannaaannagggagagacggggnttttgattcgagtacgatacgccnggccaanncnnacncngnncccggngacgcganagagnccacccgcaggcaagcaagcccactattttattttaagtccaagcccacacacgaagaagaagagaagcagggcaagaccacatgagactggatgacatacaagatggacgaaatacaaccaagatgaaataacagacggataagataagatgtgataaaataaaatcgcccgctctctaaaagaccaagcccaatagcttataacgaccctgcaaatgaaaaaaaacacaaaattaggcatggagacccacatgacaaaactgcataatgaagtggacaaccaaggctaatcaccaaataaaatggcgagaaaaaccggtcagaaacaagagaaaataatgacacatcagtcatgtcggacaaccattagctagccacacactcccctgacactagagactgacgacttagctcgaccttgaccacactcttatttcaagctcagccccaaggcaagcactacacngctacccg

SEQ ID NO: 35911 - DNA, 308 bp, Glycine max
  unsure at all n locations
aaaagaaaagaagagaaaaaaaaaaaagaagagggagacgggaccnaaaagaannggagaaaagaaaaaagaaaaaataagaaaaaaaaaagggagagagagaaaggaaaaaaaagaaaagaaagaagaggaagagaggaagaagaagaaaaaaaggaaggaggagagggagaaggggaagaagagaaaaagaagaagaaaaaggaggaaaaggaaaaagaggaggaagaagaaaggaagaagagaaaagggaaagaaaagagaaaaagagaagaaaaaaaagagaagagaagaggaaaaagggagaa

SEQ ID NO: 35912 - DNA, 558 bp, Glycine max
  unsure at all n locations
aacaacatgaaacggaagaggaaagagaataagaananaacnaaaacanaaaaaagaagggtgattggatctgtagnacagcaancananaannnannaangagggannnaaaaaannananagaaaaaaaaaaaaattttgttttatatataaannaatattaaatggagagagtggagagatgtntaaaatgagataggatagaagaangggattaggaaggaaatagagagagaaagagaaagggaagaaagagaggggataaagatgagaggaaagaaataggagagagggaagagaagtgtagaagagaaatgagaagaagaaagggaaaagaggaggaaaagaaaagaagaaaaagagagagaagggaaggataaagagaaaagaaagggagagggagaaatgaaaggaaagagatggaagaggagagaaaattaaaataagaaaaagaaggttaagggaaagaaaagagagaaaaggaagagaaggaaggagaggaagggaaagagaaaaataaaagtagaaggagaggaaaggtgggaagagaaaggaaa

SEQ ID NO: 35913 - DNA, 111 bp, Glycine max
  unsure at all n locations
cagcaagctcatgatttgtttatgtnccgaggacccagcgcctggagaccgtctctggtgtgatgacccgacacatcccatcacaatgaatgctatcgtgtatcgcaatga

SEQ ID NO: 35914 - DNA, 365 bp, Glycine max
agtctttcgttgttcaatttcgagcgtctcgatatattatgcgcctgaatcggacatccgagtgaatagtcaagaccatttgaatttctggagaacttgcatcgttgaatttcgagcgtgtcgataaattatgcgcctgaatcggacctccatgttaacagttattgaccattggaatttctcgagagcttccgttgtgcaatgtcgagcgtctcgatgtattgtgcgcctgaatcggacctccgagtgaaaagttatgaccatttgagatcctcaagaagttacgttgttgaatatcgagcgtctcgatatattgtgcgcctgaatcggacctccgagtgaatagttatgaccattagaatttc

SEQ ID NO: 35915 - DNA, 422 bp, Glycine max
  unsure at all n locations
atctttgtctttgtggaagaacatggagatggtgtgcggaggcgaggtatgacaggacgcaattttccctctgcaaggacgccaacgccagtgacatctgagaagcttggatatatagggactgtaaagcaacttagaagttcatgactaggacttgagaagagtgaaaggttaaaatacttctatctcttaagtttgacaatttgtttaagtgcacagattaaagctaatgtttttgattctacgtagcagggcaggtcgtccaaccaccagtaaactttctgatcgtaaggcatatgcacgccagaaacattcagcaattagtgcatcagcagatnttcttggtactaatttctgcttctagaanagaataatgatctcaccttctcatatgtgtataatacaagtatatcattaatcac

SEQ ID NO: 35916 - DNA, 435 bp, Glycine max
  unsure at all n locations
agcttagcctattatactacttangtttatagggacaaaaataggtcaagcaacttgttaagggtcgaaccttcaaacaagctcggccagttaagtagatttttaggctatcaattcttcaaataggtaaaattgagtcataaaaaatggtctatgacaagtaaacaattcatacttaggcttacccaaagtctagcctagtctgtcttgttttcatctcaaatgcctatatttaagtttttttttttataaaaaaataagtctattttatatctatgcatttattttatatttactatttaatttaatacttaaatgtctntttcattcttgcanatatgttacttttcctataagtccagcaagtatatttttgggctctcaaattatatttnttatttgtagctctctaaataatattntttaataaactcc

SEQ ID NO: 35917 - DNA, 453 bp, Glycine max
  unsure at all n locations
agctnctatattagtctatctcatttatcaataaagacaagttgagttntattcagaaaattagagtttatctctcttatcttagtgagagtgattctcctaaattcttgagtgattcaagaacaccctggctgtatcaaaggactttcacaacctttgtgtgttgccctcgctggaaagagtgattcttttcttcctttcatcttcacccttgttctttcaaaccacaattccagagaattcacctctgcccagaattatctcgtggccataactcccattntacgcactcaaattaagtgattcttgagcctacattgaatttcataacgagacctttcacctcgctttggaatcacctcatttggagtcctgtagcttcagttattgccatttctatatttctgccagccatcacttacactacgtttaccatcccatcatccatctatg

SEQ ID NO: 35918 - DNA, 263 bp, Glycine max
catatatacctcctcctctacataaccattaaaaagaactgtttcacattcatttgttgcaactcaaggtcaaaataagcaactaatgccaagatatacaaagagaatctttcatagatacaggagaaaaagtctttgtgtagtcgattccttctttgtgagtaaatccctatgcaacgagtcttgcctggtatctctcaatgttggctaatgaatcccttttggtcttaaaaacccatttacagccaagggcctttgcccta

SEQ ID NO: 35919 - DNA, 183 bp, Glycine max
ctctttcagagccatgctatgtgctcgtgactggccatttcttccctcgcacttgagtcgctatgctacccataagctcgcgaaattatcccggcccatactcttcttgcgagccctcttggtctcttgttcaagggctcttgcggtaattgcattctcttcccgtaacccggcacactcctt

SEQ ID NO: 35920 - DNA, 274 bp, Glycine max
gcttctatctgaccaaaaaggacggtcttataccgcgccctatttttgctcgagctcatgctgatatcgagatggttcttctgatgggatatggtacgaatcactattataagcatatgattaactagacgtgcggttacatgcctctcttacaaactttacatgatgatttgtaattattctttcttcttttcgaatgcccgaccaagctttaggcgaccatcatttgaaatattactgttatcatttgatgtactttctgggctattttttc

SEQ ID NO: 35921 - DNA, 314 bp, Glycine max
agctcggacccgggatcctatgagatcacctgcatgctgcaagcttcattgtcttcatgccgacttacaacaacgagccgcgagagactcatcgtaaggatgcacacgtcaaagctgactctgcgaaaagattgtatgaccaagcgatcgtgcatattgcaaagaagaatgaaagttatactaaacgggccatcaagagaaggaatgaagtggtactggtacctgatgatgatcctggacatgtgatggcaaatgctctacagccaagatggaatgatgatcttgaaattggccaaatacaagctaaatgccta

SEQ ID NO: 35922 - DNA, 345 bp, Glycine max
  unsure at all n locations
agctngatcattctagtagtcctcaagactatttnnttggtggttatgagcaatagcaggtttattaaagcaccacatgtgctggaaacaacatatatacatgttgcaataatccctccagaatgaacatcacagccaacaaaaatcctgtccttccccagtgcataccatatatgtcctaaggaaaaagaatcttanaatttatttccatgtgtttttcaatatatatatatccatgtatggtgcattcccggggaattttgtagcttcttttatttactatattctctcatacttttattctcatctagagtgatgaaaatgtggtattcttatgagaatatg

SEQ ID NO: 35923 - DNA, 533 bp, Glycine max
  unsure at all n locations
agacgtaanttgatatccatcgcnanccgngaanacancnaggnaggcagcgagggatcctatacagaccgcctgcatgcatgcaagcanagtcattgnnctaanagacagggcaacacacagacagggatggtaataggagccnccacacgccaagaaacatccaaaaagaccattagagaagacctccctatctatgaatggtggagctacgatggaatgacacgaatagacgcttgtgtaccgtgtactctcgccctctaatgaaaataatgatccacacggactggaaggaggaatagaggcttcctgtgacccataataccgctgacttcaacgtcagcgtacttaccgcttcttcgatggatcagccattagaggagagtggccgggatctcaatcggatcacatgaaagagatcgaacaacacatgatatcatggccttgccgcgagcgatccggcaccaatgaatgaatgaggctggacacaaatgggcgccacggtttcgagagaaaaacgctgcaaattcgaa

SEQ ID NO: 35924 - DNA, 301 bp, Glycine max
  unsure at all n locations
agcttatttttttnttattgcganacganagcgagactcagctnggataccaaccttgtgctacaacaattgtagcaagacctagtatccataatgagaganaatttgttgtttaataccttgcatcttgtatgaaagatgttctctctttaagtttgggttacgccacaagattaacttgttggatcgagtggcctcagatcaattaagaagggggggttaaattaattattcttaaacctttactaattaataattactctgttaaggcttttactaaattgttaagagaatgacgact

SEQ ID NO: 35925 - DNA, 370 bp, Glycine max
  unsure at all n locations
accgggatccttaagcacctgcagctgcagctttttttttatttctatcagctatcccagaggagaacgaccaagtgtgccacacttcatagcatgggcggagcattgatattatcagcgaagcctgacacttgggcattnttccatggacacaatgatcgtgtcctagtgagccataataccctgcctcagactttcgccatggcatgttgagcatgctccaaggatcctatgcattcatagcattttcacctcctgactcaccatcgagcaaacattatgggtctctgacagaatccactcagaaaagcgatgcccctggacatttttgtgtgcgaacctccatggtttttgcttcattatgttattc

SEQ ID NO: 35926 - DNA, 247 bp, Glycine max
gcaataacagatttactaaagcaccacatgggctggaaacaacatatatacatgttgcaataatccctccagaatgaacatcacaggcaacataaatgctgaccttccccagtgcgtaccatgtgtggcctaaggaataggaatcgtaaaatttatttccatgcgtatttcaatatatatatatccatcgctggtgcatacccggggaatatctgagctcctttattgtactatattctctcatact

SEQ ID NO: 35927 - DNA, 404 bp, Glycine max
  unsure at all n locations
agtttgtttgtgttgcttctatggaggctggatctttgagcttcaatatggtcctttaatggtgattttccaccatggagatgcagcggaagacaaagganaggaggtgagaggaggcgccatccattaaggaataagccatggaagaaggagcttcaccaccaagatgagccttggataagaagcttggagaggatgattcaatggaggaaaagatagagggagagaaagagggagggggagcacgaaattgaaggaagaaaaagggagagaagttgaactttgagttgtgtctcacaagactctcattcatcaaagttacaacaagtgttacacatgcttctatttatagactangtagcttccttgagaagctntcttgatgttagtgtntagctctactg

SEQ ID NO: 35928 - DNA, 462 bp, Glycine max
  unsure at all n locations
agcttggttttgttatatatctccccacctgacgtcccaaggtcttctgacccccgcgacatatctccaggtaccactntgtggtcaacgaataaaagtaggaagactgactcttccacactttctcacttcaagcttgtaggattatggggtacccatcatatatggtactaggtggcaatcgggcgatggtgcaagtcgactctccacatccacaaatcacagataaatccaccatccccagttgcccaccttcaactgagctcacgtactcccacgtagcccttatcctcgttcttctcaacaccgggtccccatcaatccctccaagcttccanaacatccaagcaattcaacatccaaacatcatgagctatccaaaccaagaaaacagggcagaggcagattactctgcccaaaacacattccaataccacagctntccttactcanatacccagt

SEQ ID NO: 35929 - DNA, 402 bp, Glycine max
  unsure at all n locations
agcttcaacaatggttagatggaccatntcaagtgcttgaaagaatcaatgacaatgcttacaaagttgagctgcccggtgagtataatgttagttccaccttcaatgtctttgatttacctctttntgatgcagatgtagaatccgatttgaggacaaatccttctcaagagggagagaatgatgaggacatgaccaagagcaagggcaaggatccacttgaaggacttggaggacctatgacaagggctagagcaaggaaagccaaggaagctcttcaacaagtgctgtccatactattngaatacaagcccaagtttcaaggagaatagtccaaggttgtgagttgtatcatggcccanatggaggatgactatatgacaccactcttgtctcaatttt

SEQ ID NO: 35930 - DNA, 64 bp, Glycine max
aaaagaaaaaaagagaagaaagaaaaggaggaagaaaagaaagaggggaaaaagggaagaaaga

SEQ ID NO: 35931 - DNA, 385 bp, Glycine max
  unsure at all n locations
tacgctcaatactcagacaccaacaaaaattaaanttannnaanaaacgaccattctgagacccnannnnnanggggggnnnnnggggngnggcgnnantttttattgananngaaggagggggggaaaaaagaaaaaanggaagaaaagaaaaaggaagaagaaagaaaaagaggagaaaaaaaaaaagaaaagagaggagagaaaggaaaaaaagagaggaaaaaaagggaagggaaagaaaaaggagggaagagaaaggaaagagaaggaagaaaaagaggaaaaaaaaaagaaaagaggnaaanaagggaagaaaaaaaagagaagaaagaagaaaaagaaaaaaaaaggaaaaaagaagngaaagaaaaaagaaaaaaag

SEQ ID NO: 35932 - DNA, 318 bp, Glycine max
  unsure at all n locations
gcttactttcaaagtctaattttgtaaatggaataatagatacctaaccccaacttcctattttctttttacaatgtttgaagtgaaacagattcacaaaagggagtacgaccattcttcttgaggtgagacaattgaaatttgaattttgatatcagcacggttgtgctgtaagaaacatgttcgttcttgaaaagtctgacactgatggcttcatttgtgaaaaaataaagaatggccttggatttagcatgggtgttttggaactaagccgagtgtgctatatgaaccatgctcatgctatangaagaacattcg

SEQ ID NO: 35933 - DNA, 78 bp, Glycine max
ggaaggggaaaaaaaaagaaaagaaagaaaggataagggaagaaagaaaaggaaaagaaagaagagagaaacagagaa

SEQ ID NO: 35934 - DNA, 240 bp, Glycine max
taggcgcgcacacttttagcccgagggagcccgctgtaacctaaaggctctattattcttcatgctattctgggaaaacagagacctggtaaatccccctactccaggactctatgatgatgtcatttacacagtaccctcgtaagcaggatgaaaccttcatgctaagctactaggacccaggtccgaaagctcaaatatagactcactagaaaaccgtaattgaggctgcagcctttc

SEQ ID NO: 35935 - DNA, 348 bp, Glycine max
  unsure at all n locations
agcttgaagtgngtatcccacaatcttttcatagtagaataccggtaatgtgtctactatcattgtcatcattttttttcggtcattgaggtgccacttgagctgccaggtctctccacctttgggtgtattctttgaaagatctgtgcccctttttgcacatgttctgttgttgcatcctatccagaaccatatcaaaattgtactgatactgcctaacgaaggcaaccattaggtccttccaagaatggactcgggaaggttccaagttagtgtaccaggtaacagctaccccagtaagactttctttggaaggaatgtatcaacaatttctcatcttttgcgtat

SEQ ID NO: 35936 - DNA, 456 bp, Glycine max
  unsure at all n locations
ncaagcttttcttttagctttgctacaacctttatctccccctgtggcaacatcaaaaagccaaagaactcggaaatcaacacagttataacaatggagtagcaagatataagtatcagagtattaaatccaataagccaaactcataatcaaggaaataatcaaaccagaattcaaataacataaaatgtcaacaaccacaaaatatccaagactgaaacacaagaaaaataagcaaagtacttagcataataatgtaaattctaagaaactaagagccaaaatacacggcttataaaagataaataagcagaatctaaaatctatgaagacgaaggaggtggtggaagatcaaaactctgacgaatgtatncgacatcctcttcaagctgtgtaagacgaatgtccataccggcanagcgtgaatctaacgagtcanagcggtcaccaacatac

SEQ ID NO: 35937 - DNA, 257 bp, Glycine max
cacaccaacaagaaccaataaaaaaaaaaaggattactgaaccaaaaaaaggcaaaacccacacaatgaaagggcacaggggaaaaacaaaaagacacgggaaaaacgaacaaaaaaaggaaacaaccaaacccaacccaaccaaccagaccaaaaaaacaaaacacaaaaaaccaaaaggcacaaacaaagcaaaacaaggaagacacacccaaaagacagaacacccacaaaccccaaaacaaccacagcacaac

SEQ ID NO: 35938 - DNA, 424 bp, Glycine max
  unsure at all n locations
agcttcttatttatgcaattcttgngggtgaagctccttcttccttggcttattccctagtggatggtgcctcccctcttctcttctcctttgccttccgctgcatctccatggtgaaaaatcaccattgaaggacctcattgaagctcaaagatccagcctccatagaagctccacaagtaagcttccatcatgtataaatttgcatagaattctttcaccaaatacaggtctatgctcccatcggctaaattggtgaggcgtttatggaaattacgcctctccagctcggtcttaaagtcatctaactcagtgtgatacaactctactttcctctcaagtaaaatgtttcttcctagaacattatcagtgtatttggtccaagcatctaatgaagagaatctccttgtgtcatattgagatg

SEQ ID NO: 35939 - DNA, 374 bp, Glycine max
  unsure at all n locations
agtttgttngttattcttgatattnnaagtncatcgagatggtggatnttataatccatttcgcttaacacgcgaattaagcgaatgttacatgtggattttttatattctaatataaaaaatatataacattaataaataaaatgtgtaaacaaagtaaaaaatatataatttaagtgttttttatataatctaatgcttgctgaatgatgatataatattttgagttagtataaaatcatatattaagtaaatataatgtaaaaaatatattttaagtaatttagatgcaaattgtgttactattttagataaatagattgtgcattaaaaaagttatagatagattttaatatgatcttatatcggtcaaa

SEQ ID NO: 35940 - DNA, 456 bp, Glycine max
  unsure at all n locations
agcttatcaactcttttatatataacaattactggatttggcttatgttgatgaaggtatatggtagcatatacttcagatcatctttcttcaagtgagtttgaaccccaaccgtangaaaggcagtaaggcacatgttgtgagtctagaccactcacaagtattttagtcatgtgatgagcaatttatgtagtaacataataacatgcgagtcttcaactaataagtattcaagctatgattatgaatttgctctcttcctttttgattaatgctntctaattgtggtaagtgtgtcataaagtgttttgttatacgacagttaaaacaagttaattgttgacacaaaatattttgttaggcacaattaattacttatacaactaataagtcaataaatgggtgagtggtggtatgtntgctaagtcaaccatcaaatctaatctgtgaataact

SEQ ID NO: 35941 - DNA, 352 bp, Glycine max
  unsure at all n locations
agctntntggattatttacatgggaccaactcattntatttcagagagttgtatctagtcaaagtctgagagaccatacaagtttcctagcgatttctaattatgtgggacattaagtctatcatatgctgacaatagccgagaagcccatgaatntcttcgggggcggagtaggtgtccgccatcgccttggccttggctaacaatcggggaagttcttaactcccgttcaaggtaagagcaaaccgatccatccacaccgttgcctcttggtgtaaagagtcgatcacccttcctctagcctctttttctgcgtatacttgggcatactcgtccgcgaccctatgctcgt

SEQ ID NO: 35942 - DNA, 273 bp, Glycine max
  unsure at all n locations
atatgggctacgtgggagtacgtgagctcagatggaggtgggcaacangggatggtgggtttatgcgcgcattgtggatgtggaaaacttgttgtgcaccatcgcccgactgccaccaagtaccacatgtgatgggtaccccataatcctacaagcttgagatgaggaagtgttgaagggtgaaacttcctgcttttattgttgaccacagagtggtacctgtagatatgtcgcgggggtcaggagaccttgtggacgtcaggtggggtgcta

SEQ ID NO: 35943 - DNA, 519 bp, Glycine max
  unsure at all n locations
ngaggctcctagtatcgtgcagtacgcgaatnagctcgacccgggatcttttaatcaccctgagcttccaccttgaaattgttgnttctaacctctcgctaacccatctgctggcttagcgactggccgcaaagcacaacactcatgggcttagcgtgaagaagactctagaanaagatgaattggaccagttcgcttagcacaccacttcatctcacaaagcgcaccgcttncggtcatcttgctagcgagaaaggcacgcgcttagccagcattcactaatgtgcgctaagcggtccataagtgcgcttagcacatgagcacgaacaatgccacctatttaagcctgatattagattttagaaaggggagttggactgggattcagagttttgcatgtctagaggttctagaaagagaaanggtcccagtnccataaagtttgagagattttgtgtgtaagatctgcnagaccagagcttgagcaggaccgattcagacttgaatgagtttggagtg

SEQ ID NO: 35944 - DNA, 413 bp, Glycine max
  unsure at all n locations
tgtttgtattgttatcactatcaaattctccaatatagattgtgaacctatctttgtttttccaatatgaaaaatcatcaacccagaatgagtcaacattattntgttctctaatgccaggtctcataagataacaatacaaacaacatgtagcatcttttgatatattatattccaaccaattgctaaatttcaaaaaccaatcacgattaaactttcaaattagagtcttaaattgttgtattggaaaatcatgctctcttggctgacaaggttctttttgctaataaactcttcggatgttatcccaattattaggatgataacatgatattntgttcctctctcctagaatagcatgagaatattccagatcaacttctaagactctttgtttcacatatgactataat

SEQ ID NO: 35945 - DNA, 270 bp, Glycine max
tacaccgtattcattctgattgagagtgaataatccatagaaaatcagcatctatcatgatgtgcagaaatatttgcaacttcatttgcattactctcttgcaaaatgtgtggaaatgctattattgttttggcatcttaattctgtattccttattgctttggctaataggtcattgtaatacgttgatattccaaagatgcatgttagtagtaactcttcccaaaaaattataattattagagctatatacaaatgaagttcaaacct

SEQ ID NO: 35946 - DNA, 361 bp, Glycine max
agcgccgagctcgaaacaacaaaggaacgcggggaagacacgagctaccgaacgattttgttcgccacacaacaggggggggggaagaaaaccccccccccaacagagaaaaagaaaaaccgggatgaagacgaaaacagaaaaaagcacagcaggcacaccaggggaacacagccacaaccaggcccgcacgaacgcgggagcaaaccccgaaggacccgcacaagagccaacaagaagcgggaaaaagagacaacaagaagaaacccgtaagacgacaaaaggaaatagaacaggcgagcgaaagccagaaagcgcagagcaaaagagaaggaccaagagggagaagcaggcagacggg

SEQ ID NO: 35947 - DNA, 340 bp, Glycine max
  unsure at all n locations
agcttctgnttttcaantttgagcgtgtagatgacttatgtgcgcatatcgaacattcgtgggaaaacttatgaccattcgaatatctcgagagctaccgttgttcaatttcgagcgtctcgatatattatgacccccaatcggacatctatgtgaaaacgtatgaccattcgaatatctcgagagcgttcgctgttcaatttcgagcgtctagatgagttatgtcctcgaatcgaacattcgagtgaaaacttatgaccattcgattttctcgagagcttccgttgttcaatttcaagcgtctcgatatattattgttcccgaatcggacactctcgaa

SEQ ID NO: 35948 - DNA, 448 bp, Glycine max
  unsure at all n locations
agcttcatgattgattggcctcagcaaactccttatttccagaagggaattctatcaatagacctccaatctttaatggagagggttaccactactggaaaacccgaatgcaaatttttatcgaggcaatagatctaaatatctgggaagccatagaaatatggccttatatacccaccacagtagagagagtttcaatagatggtagttcatcaagtgaaagcataaccatagaaaaacctagagatagatggtctgaagaggatacaacacgagtactatacaacttataaaccanaaacataataacatctgccctaggaatggatgaatatttcacgggttcaaattgtaagagtgctaacgaaatgtgtgacactcttcgattacacatgaanggactacagatgttaaaaatctaggataaatgcactaactcatgagtatg

SEQ ID NO: 35949 - DNA, 250 bp, Glycine max
aaaacagggaaaaaaaaaagagaaaattttgaaggaaaagaaggggaagaaagagaacagaaaaaaaaaagggaggaaaagaaagagagaaaaaaagagaaaaagagggagcaggggaagacaagaagaagaggggaaaggaaagaaaagaaaaagagaaaaagaggaaacaagaagaaggaacgagaagaaaagaaaaaaaaagagaagaaaaagaaaaggacaaagaaacaggaagagaaaaaaagaa

SEQ ID NO: 35950 - DNA, 513 bp, Glycine max
  unsure at all n locations
ccaaggacaagcgaacgaaagcaaagggattntacccaanncaannnaaagagtgtctaccctcatcacacnnaaanaanggganngagagnnaaagagagagaggaggagattgtgtgtttatagggaagaaaaaggggggggggagaggagaaaaaaaaaataaaaaaaagaaaagggaagaaaagaagaaggaaggaggaagaaattaaaagagaaggaaaagagaaaattgaatgaagaaagtggaagataaaaaaaaagagtaaaataaaaggataaaaagagtgaagagaaggaagagaaaaaatgaatgaagaagagaaaaattaaaggaagaagaagaacgaaaggaaaaaattgataaagaataaaaaaagaaaatggttataagaagaaggaggaggaaaattaaagggaaaagagaantgaagaagaatgaaaaatgaaggaaggtggaaagaagaggaagaagaagagggaagaaaagaaaaaaaaaaagatgaagagggc

SEQ ID NO: 35951 - DNA, 352 bp, Glycine max
  unsure at all n locations
agcttctgtttttgtggcagggcgggcttccttcactgtgttgtctcaactgcgagctttggccactgctnttccatcccgcgatgcttctcttcatatccgcctgagtgggcttatagcctaaaccatacttcccacgatttcctttggcatttatcaggctagttatgccgccgctgtctttgcctaaacccattccgggttcgtaaccgttccccaacataactcgggccatcattactgctgcatcggacaggcaaggctacccagagaaggagtccacagaggaaatgcttaccacctcaaaagactagaaagcggtgtctaacgattcctctgcgggcttcacata

SEQ ID NO: 35952 - DNA, 422 bp, Glycine max
  unsure at all n locations
agcttanacatatattaatccccatttcctccagcaacaaagtgtgcaacttgaacattattgcatccctgccttatatacactcttgtccttgaagaacaaccattttatgctatggatcaaattcattatatttatacctgacctattaaacactaatgtatacataataacctatgaaacattaagtgctagctcatacatagctatgaacatgtagctagaccatcttgtggtagcaaactcctttcttgatccaatgtctccctaattgccttgtaaaaggttatccatgaagaagagtatgcatcaacaggaccccacataaaggtatggtttggacttgcanggcatgcagtaaccaaaaccaaaactgaaactggcttaatattctgtgggaaattgaatgccaagttatcaac

SEQ ID NO: 35953 - DNA, 306 bp, Glycine max
actgcatggctgtgtcgagtgaccgtaattgcaatgataccggtaatgtattgagtagtcggctctcaatggcgtgttagccctttttggcatggccaaaatgtctacaactaacgcctcatccatgatatgagatctattggctgtagcgtgagtgtagcaagcataacacggccatcggggtggtcgatccctcttctcgtagtctcgagctttgttcgagtcgggcttatcatgtctatattggccgaaatggcatacactcacacctgttgaggtcgactattgacaaattatgtgcttaaa

SEQ ID NO: 35954 - DNA, 427 bp, Glycine max
agcttaaagtatgcccgagtcattcatccctatgagatgttgtcgaagtattggcgatcagaattgccattccttggattatagggttgaaccaagctcatgcttttacaaaaaggttcatcaagtcaagttgaaatatggaagtaaccgtcttgcaaaattggggcaaaagatgaattgagtcacatcactgcttcgtctactgccaaacatatttaggattattgatgtccttgttacttccagtttcaccttgacaaagatgtcatggaccatgttgaaaatctaaattgattcaaccccatatcttgcgtaaaaattcgcaatacttcaactgtgcatcattcgcatgcatccatgctattcattggttgcattgctcgttgcattctttccttgaaaaatacaaaaaatgaacttatcattg

SEQ ID NO: 35955 - DNA, 406 bp, Glycine max
  unsure at all n locations
agcttcagctgttctatttcgagcctctagatatattatgtccatgaatcagacatctgtgtgaaaagttatgaccattcgaatttctcgagagcttccgttgttcaatttcgagcatctcgatatattatgtcccagaatcggacatccgagtgaaatatatgaccattcgaatntctcgagagcttccgttgttcaatttcgagcatctcgatatattatgtcccagaatcggacattcgagtgaaatttatgaccattcgaatttctcgagagcttccattgttcaatttcgagcgtctagatgagttatgtctccgaattggatatctgcgtgaaaagttatgaccattcgaatttctcgagcgctctctttgntcaatatcgagtgtctcgatatattatg

SEQ ID NO: 35956 - DNA, 447 bp, Glycine max
  unsure at all n locations
agcttctatggtttctataataatcgattatcaattgaggtgagtaattatttataaacatagagagctcctaagtttccagatgcgatctaattgattacaatatgtggtaatcgattatatcaagctacaaagactttcttcttttgaaactagcttgggttatcgattaattcaataaaaattaccaatatttgaagagaactaaattttgttgcttgttctaacactctgcaattgattacttaaacttagtaatctattacacattgtttgaacttattgcttcttagaaactatgagattaatccatctatcttctcatgtntgataaccactaagcatggataaagagaactaaatctaagacacttaacatgcctagtttagatatatctgatacaaatgccatatctttagagatctgttgacatttcacatattaaa

SEQ ID NO: 35957 - DNA, 290 bp, Glycine max
  unsure at all n locations
tctgtctcaacggtatctacaccagctnggatagtatgatataatatcttcacagaggcgtcaaccgcttccaactcattcaatacaggaaatttaccaccagaacatctaactctaattatctcatatacaagatgctgcgaccttctaaaatctggagcccatgaatgtatgtcggccacattcaagtctgataacttctttgacgagccagagaatgctgctgtaaacaccctgcaaataaatacagtctacaccttaactccatacatagcttgcatcaaaacctt

SEQ ID NO: 35958 - DNA, 410 bp, Glycine max
agcttattgttttatggggcgcccgtcatatgtggtactaggtggtgatcgggcgatggcgcaaatcaactctcccatttccacaagtcaggcataagcacacaatccccagttgcccacctttaaattgagctcacgcactcctatgtagcccttatcctcgttcctctatgcactgggtccccatcaacccctccaagctttcacaatatccaaacaattcaatttcatttgtcatgaaactaccctaaaccaagaaaaacagagtggaggcagaaaactctgcacaaaactcattcaaattccacactgtttcctactcacataccccagtaacattctcttcgttctgattcgttaaccattggatcgccttgaacatttactgagggttcttaatacagaaatct

SEQ ID NO: 35959 - DNA, 443 bp, Glycine max
  unsure at all n locations
agctntatatcttatcaactcanaatctaggtatctaaaaccccacaatttattggattgtcaaggtttgagaagtgaaaatgagaatggggtaactttggagcaaactctcatctcaaacaattctataacattaatctaaactctctcaaactgtttttacgactaaaactctaccgaatcaaaatttgactcctcaacacccaatttaccctataaatggctcttgccttcactttggtcactcattttcctcctttgcacagcccaagctttcccacagtcctaaatgacatttcaaactaggattaactcactctaacctccaataaccactaaatccagatgtggctcttcaaatcctcgaagcatcacactctttcactcatatcactacattcttaatctttaaccctaagttaactctacccttcatctctatc

SEQ ID NO: 35960 - DNA, 410 bp, Glycine max
  unsure at all n locations
agcttaactctctattttcgcanaactgatgtaaataaaagcgctgtggcattttggtaaataagttgacttaattaacatcggttttgaaaaaatcgatgctaacattggtttttctaaaacccaatgttaacattaatatcttaacatcggttattgaaaagccgatgttaacattaatatcttaacatcagttattgaaaaactgatgttaactttaatatcttaacatcggttattgaaaaaccgatgttaactgtaattgaaaaaaccgatgttaacattgtaaagttaacattggttntgtttaagaaactgatgttgtcttattcataacttanaaccccaaaatccattttcccccacgcgatcagttaccaaaacccttctccctttcttcgtcatcgctc

SEQ ID NO: 35961 - DNA, 400 bp, Glycine max
ggcagcaagctttttatcttggccatgctggattgttaggagagatttcttggcatttgtgctcataaacgcaatatccaccactccttcattggtctgccaggtattgtgattacagcaggggagaataatcacattctcctctgacgacactttctgatactcatcactctttctgtttgttatgtcagagggaatgtcgacgatgaattccctgactagactttcatatcaatctcccaacttggtgacagtattcaacagtccagcaaccttgatgaggacatgatctccttgcgatccacagcatctcttaccagagctctgtgtaatgcaagtctcgcgtgatatacaaaattacacctttcaacatctgcaatggagtggaatgaaatgttgt

SEQ ID NO: 35962 - DNA, 421 bp, Glycine max
agcttattctctgttaatgtaatttgagatgcccgaagaaacaccatttactagttaaccatgcattatgtaccatgttcaattattttgttttgttgttgagtgtttttttttagaaatgggtttatgatcccaacatggttggctcatggtgcctaacacatgcaactaataatgtagtgtgaagtttcacgcttccacctttttgtttttgttttgtagaggaaaacgcatggatgagcaaacatgataactgatggtatgcaattttgcaaatcagaaagtttgttgaacgcatatgcatgatgatgccatgactcatgcgatatgtgatgttggaatatgataacgtgcaatagcaggaatgatatgttcattatgatgtcatgaagagatgcttatgcgatgcatgatatgaatg

SEQ ID NO: 35963 - DNA, 445 bp, Glycine max
  unsure at all n locations
agcttccaagatttattatcaagattcattcaagaatccagagaagacctaattcagaattagttttaaaaagtttttttcaaaacctgagtaccacatgaaattttctcaaaaccctttaccaaagagtttttactctctggtaatcgattaccagattattgtaatcgattaccagtagcaaaataattntcaaaaagctttcaactgaatntacaatgttccaattgatttcaaaatgttctaatcgattacaatgttttggtaatcgattaccagtgtgtttgaacgttgaaattcaaattcaaatgtgaagagtcacatcctctcacaaaaaagctntgtgtaatcgattacactaatttggtaatcgataccagtgatagtttctgaacaaatcanaaaatgtaactcttcannatagttttaactttttttaaaatgg

SEQ ID NO: 35964 - DNA, 362 bp, Glycine max
agcttctttcttattatattaataccattccagagtttctatgtgcccactaatttaattacattgaattagagcttgaattacacaaaaatattacttcaatcagtacaacatccattaaccaaggcccgattttgtaggtgtataacaatgtcaattatgtacaaaagtcaagtaattaaattccctgtacgtaagggcattcatgagtgacatgaggctcatttgtgttgttattgtctttgaaaattattatatcttttgttcatttgttttccattatttatgattgctccatttttggctgcctagctggctagcttttagatcaacggaaacaatgggttgattctaaagggtag

SEQ ID NO: 35965 - DNA, 322 bp, Glycine max
  unsure at all n locations
aaaaaaacttaatggctgagtgtaactganattgtggcaaccaaaagtcacccncaacagccaacaagtcagccaccatttggtctcccaaaatgctgatgcctatgttgccaattgggcccttattacaacttgaactaaacctaactaaagcccttttagttgattaacccaaaacatatntttggtcagccaactttacaaggattgggccattatttagacaaactaaacactctaaaattgagacaaggtggtgtcatttagtcctccttcatttgggccatgatacaactcacaaccttggacttttctccttgaa

SEQ ID NO: 35966 - DNA, 406 bp, Glycine max
  unsure at all n locations
agccttgcctcatttattgtcangaanggacaaggcagccgagggacctagttccgctccggagtatgacagtcaccgctttaggagcgctgtacaccagcagcgcttcgaggccatcaagggatggtcgtttctccgggagcgacgcgtccagctcanggacgacgagtatactgatttccaggaggaaatagggcgccggcggtgggcatcactggttactcccatggccaagtttgatccagaaatagtccttgagttntatgccaatgcttggccaacagaggagggcgtgcgtgacatgagatcctgngtaaggggtcagtggatcccgtntgatgccgacgctatcggccaactcctangatatccgttggtgttggaagagggccaggaatgtgagtat

SEQ ID NO: 35967 - DNA, 376 bp, Glycine max
atcagcaaagcacctaaggtgctctgtatctatatgcaacattcatattccagacatgaagaggcacaagcttgaagacaagactatacgacgtatcttccttacgtatagcaatatgtttaagggctaccgtgtctacaacttgcaaactaagatactcgtcatcgtcgagatgttgaagttgatgagtacgctgctcggaattgggatgaagaaaaagtggagaaaaacgttcttatgactactcaactacctcaagaagaaactgaggaataagacccatgtgaaccaccttcacctccaccacaacaacaaatcaggaactatcatcactagagtctgctctaagacgagtaagatctttactggacatata

SEQ ID NO: 35968 - DNA, 449 bp, Glycine max
  unsure at all n locations
agcttcatcnttaatctcaagaaggaagtgataaagaagattcggatgaaataaacgaagatgatgatttcagtctttttgtaaagagattcaacaaatttctaagaaacaaaggaaatcaaagaaaagagtagaagattcatcctctcttgcaaaatgttatgaatgcaatcaaccaggacatctgagagttgattgcccaagtttaaagaaaagaatagagagatccgaagagaaaaattccaaagataagaaaacaaataaggcctacattacttgggaagacaatgatatgaactcatctgaagattcagaaaatgagagtgtaaacctgagtctcacgacgaagaattatgatagcgatgaagaagaacatcttctaataacacattatatatctcattngatgaattacaagatgtattcactgatntacataaagaatcaat

SEQ ID NO: 35969 - DNA, 387 bp, Glycine max
atcagacggtggtaaatcgcgtggattgcccctagtcatgtactatatgcagcaaataatgagtttctcaacaagcacctaacaagggggtaaaactacagctatactcaaacgatatccaaatgagctgatattttgtgaggaacaccctaaaatcatgaaaagatagcacaaaaaatttcaaacaaaaattcaaagtcaaaatatgaaaactacctaagcaaagtttagaagaataagacactaatactaaaaaaataataaaaacctagtaaacggctgatatttcaagtttaaaacggaaatggacctctggttgattgccatggcatgggacattttcttctaccccaaatgcatatataataatagtcattctgatacccg

SEQ ID NO: 35970 - DNA, 375 bp, Glycine max
  unsure at all n locations
agctntacatctaattcaatggccgcctgaatcccgagggtgcatgcttcgtactcggccatattgttggtacaatcaaaacctatcctagccgtgaaaggaatacaatgatcatccggtgatacaaggactgcccctactccgtggcccaaagcattaaacgccccatcgaagcacacaatccatttgtgtatgtcctcgtgcgtctgcttgtcttcaaacagggccatgatatcttcatatgggaactcggggtgcatcggccgataatccgggaggagttgctgggccaaataatccgctaatgcacttgcctttaccggcttttgggtgacgtacacgatatcgaattcagataatagtacctgccaccta

SEQ ID NO: 35971 - DNA, 368 bp, Glycine max
  unsure at all n locations
agcttgactgatctgcaaaccttggatctgtcaaggttaccaccctcgacatcgaacaacacttgtccacgcttaggggctcgataaactcgtgacccttctacttgtcaaggctaccatcctcaacattagacaacacttagccacgcttgggggcttgataaacttgtgacccttctacttgtcaaggctactgccctcgacactagataacctccattgacattagacaacctcttttgcccacaagctggctcagagattgnggggcttatgtacagtccaggtcccacaaaatacatgtgacangtgacatggcactccaataacacatcaacccttcatgtcagccctggcataggagtata

SEQ ID NO: 35972 - DNA, 414 bp, Glycine max
agcttgtttcttatctcgcccaggcgagcagggttgcttcctccatatgcaacagccttctggaggaatcttctagagggcccaagtgggcctggttgctatttgcacctccatttttactaagtacacccacctaccttttttttggtgattctttttcgtaaagttacggaaacttacgaatttcgtaacgatacttgttttctttccgtaatgttacggaaccttgcgaattacataatcatcccctttttgacttacggaatgttacagaacctcactaattgtgcaacgatgctctcatttgatttccagggtgtcacagaaccttacggatcgtgcatcaatattttcttttgttcttcgacatgtaccggaatttcacaaattgcctaatgatgggtgccaagcacc

SEQ ID NO: 35973 - DNA, 432 bp, Glycine max
agcttgttattttctgaagaaagaaatcgaagtgaacgaaatgaagatgaaagctacaaaacaataaatgaattgaaattctcgaatttgaacacttaccggttaaagaccgaagaacgaacgaagaacggtgaagaacggtagaaaatcttcacggattggctcacgaaaatgtctcggaagcgttacaaaagcacctcagcttggattttcttcacgaaaatacgttgttttttacttaaaacagctgaaatgcatagcataggggtcaaggatcctttggaacagccctcctcgacctatttatagaaaaaagggggtggagcttgccgcctagctcgcctatgcgagaagatggcttcctcgggaagtttcctgatgcaccccccaatttgataagtcacccctcctttatactttacggaacattac

SEQ ID NO: 35974 - DNA, 386 bp, Glycine max
  unsure at all n locations
agcttgccaccctgctcatctangcaagccaatgggttccttcaaaaggtttctggaaccaccttccatttccataagttcaccctccgtttcgtactttacggaaaagttatggaagcattacggaagcctatcggacttgatattcttctttnttgtccttcctcccaccaatattaagtggaaaaggcttaccacgggttacaggaattttagggaagcattacggaagccctagaggcccgttttcaaaaaaagagggaggtgtttgccgcccagcttgcccaggtgagctggttgcttagccaggaagcaagaaaaggtccagaatcctctagatgggcccagattcaagaatttctatttgcacctncatcttgataagt

SEQ ID NO: 35975 - DNA, 525 bp, Glycine max
  unsure at all n locations
aaaaacttcgttaggggcttgnattactnggcgaattgagctcagacccggtgatcctctatagtccagctgccngcctgccagcatgtctcatagttgtacagcatggacagcgcagccgtaggagctagttgcgctcttgagtatgctattccccgtttgacgagcgctgttcgccagcttcgctactaagccatcaatgggtggacgcttcaccaggagcgatgcttcctcctaaggacgactagtgtactgacatccattaggagcatgggctcctgcggagggcaccgatgcttactcccatggcccacatgttccagaaacacccctctgtttctatgaaatgctctgtcacctatgacggcgagcgtgacatcacatactgtgttaagggtcagtggatcccgagtgatgtgcacgctcttagacatgctctgcgacaatctgtggtgtnataagacggcccgactcacccatggactgctgagtactccgctcatgaggctcattatggtgctctct

SEQ ID NO: 35976 - DNA, 420 bp, Glycine max
  unsure at all n locations
agcttggcaccctttctcttccaagccaaccagggtgccttcctccaaaaggaacaaccttctagaggaccatcctanaaggcccaagtaggccctgtttgctattgcacccctctgtttactaaatacatccccctgcctttttttgcttattctttttccgtaacgttacggaactttacgaattccgtaacgatacttgttttcctttccgtatgttacggaaccttacggattacgtaatcaccccttttttggcttacggaatgttacggaacctcacgaactgtgtaacaatgcttcctttngatttccngcatgttacggaacttcacggatcgtgcaacaatgctctcntataacttctggcatattatggaacttcaggtattgtgcaacaatgggtgccaagtatctcga

SEQ ID NO: 35977 - DNA, 515 bp, Glycine max
  unsure at all n locations
aaaactcagctggggcttgatntactgccaattgagctcagacccgggatcctatgagtcgagctgcatgctgccagctcgtattgttgttgatccgaatggtacatgcgcacgagggagntgtccacacatattgaccgatagctatctgtgctctagagagagcgatctctctcactacttgcgtgattcaagaccgcgatggctgaatcaaggacattcacaaccctcgtgagtagccctcgctggaaagagtgagtctttactctctatgctgccccaccgttgttcgctagagacacggtaccacaatatccacctctggacagaatgatgtggtgaccatcactcgcattgaacacgactcgtgccatgtgatgtctggcgctagattgagtttgacgacgagacctttcccctggctatggatgaccacatagggagccatgagcttgcggatctgcatctctatatgtagtganacaccacttacctacatgcaccataccattctg

SEQ ID NO: 35978 - DNA, 370 bp, Glycine max
  unsure at all n locations
ccaaccaaaaaaccagaagagacaagggtccaccctacgtactactctcagggaaccagtcgtggccctttaaacgataaaaccacttgtcacanaacataatcgaacaacataacgactataattatggctatccaaccagatttaacaaacaacttgtcgagggttgaacacccccagacccaaaccacagtgcgtatagacaaaaacaacaatatgccgagaatatatattataaaataaattcgcatgccattgatgtaattgccagagtttgctctgtgccactcttatcattcaataatcataatagaatataggcacacatgagaagatagtgaatcaacaacattagactnttcaagcgatg

SEQ ID NO: 35979 - DNA, 369 bp, Glycine max
  unsure at all n locations
agcttctttgattgtctaagtgtggaccctctanggcaaggcggcattctccactattttcggagccccatgaatgtcattgcctagcgctgttcatgtgtcttccaccttcgagtctggagccccgcgaatgtgattgcctatctctatacgccaattctccattctccacttttattcggagccccatgaatgtcatcgccaagcgctgttcattcatcctccacccaaagagtatggagctaagcttcttgattgcctaagtgtggaccctctatggcaatcctccattctccactttgttcggagccccatgaatgtcattgcctatcactgttcatgtgtcctccaccttcgagtctggagccc

SEQ ID NO: 35980 - DNA, 368 bp, Glycine max
  unsure at all n locations
ggcatgcaagcttgcctcattatgatgtcnncaggaaggacaagggcagcagaaaggaactatgttccgcttccggagtatgaatagtccccgcttttaggagcgcggtacaccagcagcgcttcgaagccatcaaggggtggtcgtttctccgggagcgatgcgtccagctcagggacgacgagtatactgatttccaggaggaaatagggcgccggcggtgggcaccactggttactcccatggccaagtttgatccagaaatagtccttgagttttatgccaatgcttggccaacagaggagggcgtgcgtgacatgagatcctgtgttatgggtcagtggatcccgttcgatgccgacgctatc

SEQ ID NO: 35981 - DNA, 446 bp, Glycine max
  unsure at all n locations
agcttctatttttgctgaaccattntatcaataaacacaagttgagttttattcagaaaattagagtttatctcttttatcttagtgagagtgattctcctaaattcttgagtgattcaagaacaccctggctgtatcaaaggactttcacaacctttgtgtgttgccctcgctggaaagagtgattctttccttcctatcatctccacccttgttctttcaaaccacaattccagaaaatccacctctgcccaaaattatctcgtgaccataactcccatttcacacactcaaattaagtgattcttgagcctaaattgaatttcaaaacgagacctttcacctcgttntggaatcancctcattggagccctgtagcttccgttattgccatttctatatttctgtccagccaccacttaacctacgttntaccatcccattca

SEQ ID NO: 35982 - DNA, 415 bp, Glycine max
  unsure at all n locations
agcttgatatgtgttagtgttgaagggtgaaacttcctgctgttattgttgaccacagagtggtacctggagatatgtcgtggggatcagaagaccttgtggacgtcaggtggggtactattgcccanaaccaagcttgaccaatcccgacccaacccgggcatagtcggtcagtgagaacctgtgatgtacctaaacaggcgagctcctggcagtcaatagataaaaggaacaaagaccacaaagcaaggaggcttgtggtggctggccagctgtgaaactggattgatatgtgagatatggtctctggtaatcgattaccaacggtgggtaatcgattacaatgcttacaaatgaagacaggatgctaagatggtctctggtaatcgattaccacagggtgtaatcgattacc

SEQ ID NO: 35983 - DNA, 357 bp, Glycine max
tatttcaaaattatagctccaactattcaagatggtacggtaaaaattcatcatatctgtaactgtgacagttctgatctgcaattagcaatagccttgcaacaacatgagtttgagcatcatccaccacgccagaataattcacagcagcaatcatccattactggtagctctagactggtcacaggtcctcaggtatatactggggtggatacatgtatacatatacacacagagacagcgttgttgtcggttccctgtgtatcatatcgagtcgggcagccaatggatgggatcatcttcaattttgtcgggaatctctattattaagtatcaaagacccgatcataattatag

SEQ ID NO: 35984 - DNA, 386 bp, Glycine max
agcttcttattttcatatgatgcagatgggtttgtagctacctcatgcactcctctaatgactatggcatcatttctggcgctaaactgctgggagtcggaggccatcttctcaattaaatttctggcttcagcaagagtcatgtctccaagggctccaccactggcagcatctatcatacttctctccatattactgagtccttcataaaaatgttggacaagaagctgttctgaaatctgatggtgatggcaactggcacatagcttcttaaatcgatcccagtactcatacaggctctctccactgagttgtctaatacctgacatatcactcctgatggctgaggccctggaagcaaggaacaaatgttctaagaatactct

SEQ ID NO: 35985 - DNA, 366 bp, Glycine max
  unsure at all n locations
agctnttactttatatccaggcggtcctgtggaacagcgattgccaagaggccttcgagaagatcaaacagagtctcgcaaaccccccggtgctcatgccacctgtaacaggaagacctcttttcctgtacatgaccgtgttgaacgagtctattgggtgcatgttgggtcagcacgatgattctgggaaaaaggaacaagccatttactatctaagcaagaagtttaccgcatgtgagatgaattactcaatgctggaaaggacgtgttgtgctctggtatgggcataacatcggcttaggcagtacatgctcagccataccacgtggcttattttcaaaatggatcccgtgaaatacatctttg

SEQ ID NO: 35986 - DNA, 414 bp, Glycine max
  unsure at all n locations
agctntggtgatatttctccgacttctagtgtggcangtattggttntgttgacaaataatgtagttgcaaacaaaagctttagtgtcaaagtacatgcttgaccagtagaaggaggtgccaagcctaaccaaatttggttgaggtttaaagtgtcctgtcgttggggaggagtggtgaagattggaaatctaaggcacaaagagtcaattctgtaagtacaataagcctttttgagactctgaaagttatttgcatgctttcatcaatttcaacttttctaatcagttatttgccttcacaaggtcttgcatttaaatttgtaggttatgtttcgttccactttgtaatctgagccactgttggaatatctgccaaaggacttgcaacatacttctcttctacaacaagtgtt

SEQ ID NO: 35987 - DNA, 199 bp, Glycine max
atgacgcggatgtgcatatatctatgtacatgtatgggatgcgaaactgaaaatggataagaagaactcggctacatgcagatcgtcttatgtcttgatagggtattacgcttatttctactgtatcacaagagcgtcttgtgagatacgtagaatatgctatcacctcagctgcatgtacgcggactattaagcattt

SEQ ID NO: 35988 - DNA, 418 bp, Glycine max
  unsure at all n locations
gtgtgaagaaaggccaagatcttgatggtgaacctgcaaagaatattaaacaccttcctcttccaccaggggtaaatttttaattcatggcaacctgggtaactaggttgactaaggcttcaaattttccttcaagcttttaattttcagtaaatgaagatgaatccgtggccacctcatggactcctctaagaataatagcattcatttcttgcactgaattgttgngagtttgaaaccatcttctcaatctaattcctacctcagcaggggtcatatcaccaagaactccaccactgacagcatcaatcatactcctctccatgttgctaagtccctcatnagaatattgaagaagtcctcagaaatatggtggtgagggcagctngcacacaatttcttgaatttttccagtacn

SEQ ID NO: 35989 - DNA, 348 bp, Glycine max
  unsure at all n locations
cccgtcatatgtggtactaggtggcgatcggacgatggtgcacgtcgactctccacatncacaaatcacacataaatccaccatcctcagttgcccacctgtaactgagctcacgtactcccacatagcccttatcctcgttcctctcaacaccgggtccgcatcaatgccaccaagcttacacaacatccaagcaattcagcatgcaaatatcatgaactatccaaaaccaagaaaatagggcaaaggcagaaaactctgcccacaacacattccaataccacagttntcctcactcagataccccaataacattgatctcacacaagtctataacagtaatctaaa

SEQ ID NO: 35990 - DNA, 264 bp, Glycine max
  unsure at all n locations
atgtgatgatgaccccatctttccctacatgggattccaaccagacaaagatcccaagtaataagatcatgcaatcaaaatctcctatagttgtattacccctggaacanatatatataaaaaataaggggctctaagggtatgttaaggaaataaataataaaatatctgaataaaattcaaaanaaaggtttgacctaattaatgtgccaaataaacattttttacctcgtgttatggctattggttattcttaaaaaatag

SEQ ID NO: 35991 - DNA, 377 bp, Glycine max
agctgtaggattcatgttacaaagaatgaagaatcaagaggggtcgtaatcaagattcgagactcaaaactcaagaatcaagagaaaactctatcaagataagtactaaaagagtttgtcaaaatattgagtagcgcaagaatgtttcacagaatcttttaccaaagagtgttactctctggtaatcgattatcagaaggtagtcatcgattaccagtcgtcatcattgttttcaacactgatttacatagctatgatcgattaccataatcatgcaatcgactaccaatattctataacgtgagatgtcaaattataagagtcacaactagtgagtaaacattgtcaaatcagtttagacttgtgtgatcgattac

SEQ ID NO: 35992 - DNA, 679 bp, Glycine max
  unsure at all n locations
nnaaatgtcgggtaggggcatgnagtnaaccggngaantngagctcggtaccccggggagtcctctagatgtcgatcctgcatggtcatgccaagccttcactaattttatatctcaaaataagaaaatacaattgaaccactgtcgtgttcattcattctatgtatcttttcattggcaggtagaaacttgacaaattggagcaaaacagatacttctccactagacaccatgtcacaacgtctctagcgggcgacgagaagaattacgacagcatattttactttcatatcacaaggatgcttctctgtggagaatacagtagaaataacgtattacgagcaacaattggtattagtgcgccataagatatagcacttttctcacagtactgtaaagaaagaactgtagatcagacatctcgtgatactacacacttggtgcagggctgggtggtgtatcattcactatgtannatttcttatagaangtatcgaacgatacatattcacngccagtatgatctgacttcaccatcgccctcttcgtatgaagaggataccttctcgactttctctttattaanatctcatcaattccgcntttaatcatacactgtcgtgcatatacctgattggactctatctgaccttattttgcgaatgntattggccgtcgn

SEQ ID NO: 35993 - DNA, 487 bp, Glycine max
  unsure at all n locations
gctcgacccgggatctctaagcacctgcagcatgcagcttgagcctattcctgactcaccataaaccttgacccagggtgagaatgtcaatccttaccctcggaagcaaaaaaagaatagaggggaaatttccaatcaaagaaaaagagaaggaaaatttccaatgaaagcaaaaaaggaaaagaaggaaaattccccaatcaaagagtgggagaaagcaaaaaaagaaaagaaggaaaattccccaatcaaagagtgggagaaagcaaaaagaaaagaaaggaaaattcccaatcaaagaatgggagaaagtaaaaaggaagaagaagaaggaaagaaagctcctgatcaaggatcgaaagaaaacagaagaaaagtgcagagaggtctttggaccggacaatatctgaacaatacagaattgccaccaaatgaacgantaaagaatgaagggaaccacgacctanaatagtcttctccctttgat

SEQ ID NO: 35994 - DNA, 418 bp, Glycine max
  unsure at all n locations
tttatgcttatgtacatatctcgcctgcgcgagcaaaggcacttctatacgaatcaagcagctctgttgagcgagctattgtgcaacctgcaccctccatatcatatagatacgcatgatggggctgacgagaacggtccattatcatatattaataggctctcactgtaatttatgagaacaacgatactgaataacaataatctgcgcctacgcatgtccatgacccttccttaacatttgcgcgatcgacttgtggtcgtaatgaccttcttctttcataacacggcaatagtattcatgacttgtgaattaatctataagcgatgccacatcttgtgctcacatgctaactcattctctacatacagaatactatcttgtgtagcgagacttacgactattggtacaacctacn

SEQ ID NO: 35995 - DNA, 441 bp, Glycine max
agcttgagttgtcttatgctctttttaaggctctgctcgacttacataaaagtctgacttacgagcctatttaaaagcttgcttaaagacgtcttttattaattaattattttaaaacctagtgaaatactaactaaaaaaagaaacttattaaatttcgtatgaataatgtacaaatctaaaaataattgataaacaaaattatattgaattcaagtcgttaaagcacaaagtctataaaaaaaataaaaatagcataatattaaaaaatgtatggattagagatgatttacactaatatagcctaacaaaaattattattagttaaattaacaatttctaatccacattttttaatatataattatattatatatgtttaaaaaaaatatatgcacaataatgtcatcttagtctactcaagccatatcttatataata

SEQ ID NO: 35996 - DNA, 448 bp, Glycine max
  unsure at all n locations
agcttgtgtatgctccatctatccatgttgtctctccctaatctcatgcatttgtattcaagtggccgtagaatgtagagagattgaaatccttaatgttcattcaaaatctttgtgacccaaaccatagtagaattctgagtctacactggaagagagggtctgggcacttcatgtttcttcttcatccgttgctcctctataacaattttttcctcctccttttgttgatgggcaggctttttggtttggacctttcccttatgctccctaaggatccttttaaccttcatagcaaggccaaaagtttccaaagccttgtctttattagcaatagccttggccagtttcttctgcctcttttgccgaatgtcatcctagttcactagaggaataagtatgttcctcttgatgtcaaccttcattaccttcanggtttacaacactg

SEQ ID NO: 35997 - DNA, 435 bp, Glycine max
  unsure at all n locations
tgttatnnatganaaacacaagtggcggggtctttagagtctcgaagatagcatgatgaactaacggacgtcaatatggccaccgttgaagccttggaatgaaaaaccaacaaggcccgattggaaaaacactaccactacaacttttgaggggcctctatatggcaccaataatgagctcccactcttgaaaggtgaaaggaatcatctctgtttanatgcatgaaccggatggacgagctatacgcttgccttatgtctgaaagatatctgtcccatctgtctctgtgagactcgatggaatatgttggccctcatcgatgagcgcataaataagctacaattagtggcgactcacaagcaacagctccaagattagtacgccaacattctatcatacatggaaccaatggagatggcattgatatattgtcg

SEQ ID NO: 35998 - DNA, 243 bp, Glycine max
  unsure at all n locations
agcttcaacatttcttatcgagcgtttcgatatattacgggactgaatcagacatccgagtaanaagttatcgtcgttataatttgctcagagcttcggtattgcatttcgagcgtctcgatatattacgggactcaatcagacatccgagtaaaaagtttttgtcgttagaacttgctcagagcttccataatcaatatccagccgttccatatattactggactcaatcctacaaccgtgt

SEQ ID NO: 35999 - DNA, 568 bp, Glycine max
  unsure at all n locations
agtgtgttaganannanannnnnnggtatggcttcgngctagnatctncnggngaatnnagcgtagnaggcggtgatctatatgtagacctagcatgcattgctagcttgcgttcttgttttacttacctcgctgaagatacgaacattcgacgagaggtcgtgatgagtgaactgtctacacactcggcttgacaacctttgtgaagattggcgtcactgaacactgttacgaggaaccgtatctgaaagcgcctccaggttagattttcttgacggaaacgattattccgcgctcattcagtggagagaagcgtgcctagagggctggaccccttccttcttgcattcctccactatgtatagcgaaataagggaggtggttgcctcccagactgccgcagcgagcaaggatgcttactacagaaacaaccgtcttgtggaggaatcttctggatggcccaagtagggctgagaggtatttgacccgcattatactactacacacacctgtgccgattgtcgaatacttattgtgggagcccgactctacaacnttctcctagttg

SEQ ID NO: 36000 - DNA, 318 bp, Glycine max
  unsure at all n locations
agctagtaggtgcngtccacaccatntctcatantaaaacactggttatgtgtctactattattgcgatcatttatttgcccgtcattggaggtgccacttgtgctgccatgtctctccatctttgggcgtattctttgaaagaatcgtgccccattttgctcatgctctgtagttgcttcctatcccgaaccatatcaaaattgtactgatactgtctaacgaaagcaaccatcaagtccttccaagattggactcgcgatggctccaaatgagtgtacctagtatcctctacttcagtaatactttcttggaagaa

SEQ ID NO: 36001 - DNA, 339 bp, Glycine max
  unsure at all n locations
agcttgatatatctcctgtgtagtcaaagagaagttcaagtgcataggcatctaagtctgaagagagtatgatgaactaacggacgtcaatatggccaccgatgaagccttggaatgagataccaataacgcccgaaaggaagaacacgaccaaaacaagttttgaggggctttatagggcagcaatagtgagctcaaactgtgaagaggtgaaaggaatcatcaccgttcacaggcgtgatctggaaggaccagctaaaggcttgccttatgtcganaagaaatttgttccaacagtataagtgagactgaagggaatatgcgctccatcatcgatga

SEQ ID NO: 36002 - DNA, 371 bp, Glycine max
  unsure at all n locations
agcttgtctctctatgtcgcatcctacccttcggcgggagggcgacgcgtgactcgcangatgcgtgttccacgaaaggaatacgcgcggagtcgccaccaacgtttatttgatgaaaacgtcggagaaaccggaaaagacgcgatctacgaacttttaagtgaaaggttcgggagttgtatttacgcacggtgaaggtattagcaccccacacgttcgtgccaatggacggctgcctntaatcgaatgtgcaaacatgactttgatttttatgttccctgttatgtccttatatcctttatatacttattatatttttttctttttgtggtcgacaagggtgtatccctttgctcctgctgattcctcaa

SEQ ID NO: 36003 - DNA, 259 bp, Glycine max
agcttattgtctattctcttcgatcaaacacggccgtgttggtgtgtcggcccggatttaaagcgggttgcagcaccggctctgcttccctaaccgtactggaagcggatgtcgaggcttcgtcctctatggtattctggagtgttaacatgacctccgagatggaagccatttgatcttataacgctgatagatcggacttgatctgttcctgcacactctctctattatgcattcctctggatcgagtgttataggg

SEQ ID NO: 36004 - DNA, 346 bp, Glycine max
gcgctccacccgtcttcttatatactatgttcttaaccgactagagaccgtgcttggcgcgacacatcgcgcaattcatagacaatgtcgacgttcatgtatgcttagcgcacatgtcttcacgttgccacacatccgcacttggtggacaaggcgtacaacaatcctctatcagtaccctgctctgctagacacgcatggctgtgctccttctccatctcacattttctcatatactcgaggacgggaataaccgtgcattcaccttaccctcttttgggagctgcaccgttggctatattcggtgggactctctgcctaaacactatttcatctgatccctcta

SEQ ID NO: 36005 - DNA, 433 bp, Glycine max
  unsure at all n locations
agcttctagctctatggacttacctataattaattcctttgatagcccttttgagccttgtttccctttccttgttttgaagctcactacaagccttaagtgaaaaaccatgatatcaccatatccttaaggaattttggagctttggaattgttttgggaataagtgtgggggggtttttgtttcattggataacttgttttgttggctatacttcatgatgtattttgggccatacttgatgtacattgtatattggttaaatgttggacatgctgaatgaaatgttgtttctcaaaggatatagagtaaaaaaaaacgaaaaagacaaaaatagcaataaagtcgagtgaataagatcttaaatggcaaaagaatgatgagactcttggttctactctttatgttanaatttatctctacttcttttatt

SEQ ID NO: 36006 - DNA, 440 bp, Glycine max
  unsure at all n locations
agcttcacccgtcttctttatcctangttcttcgttgactagaaaccatcagtggtgtgaaacattgagaatttgatagagaatgttgacgttcatgttgcaaaaggaagatgtcttacgttgtaaacagattcgcagttggtggttaaggcgttcaacaatcctctattagtaccctggtctgttagaaatgaatggcttaacaccttatccatttcacattttctcatatactccaggaggggaatagctgtgcatttatcttatcctcttttgggattgcaaatgttggttttatttggtgggagtctctccctagttttttttttataggatccttctagagccgccaaaatggctctaggcccaacccacttggccctccataatggtcctagcacgccttagctccctaatgangngcactatacaatcccact

SEQ ID NO: 36007 - DNA, 166 bp, Glycine max
ctgcgtttagtgatgaccacatagaggtacctcaagatatgacatcggggtcatgagaccttggggacatcacgtggtgtgctatagcccataaccaagcgtgacctatcccgacccaccccgggcataatcagtcaacgagaacctgtgatgtacctaagcatgc

SEQ ID NO: 36008 - DNA, 350 bp, Glycine max
  unsure at all n locations
tgtacataatannattgtctttcatagatngacanaacaaacttatctaaaattggagtcgtcacgtccacaccaccggcgcctggagtcataggcggccctcctgagattctangagggtaaggtgctgaacttgatgatatagattatgttagaaaagatattttaattattttttatntttttgatgataaaaaaattatttaattatttgactaaataattttttttgatagattttaatatttcttaaaacattacttannataacatttttcatcattttgattcacacatcacatgctactaactaatagtgctgcatactgtttaggacattctatcttttc

SEQ ID NO: 36009 - DNA, 386 bp, Glycine max
  unsure at all n locations
agccttccctctttttaccaattacccttcacccaatttaaatccatcttggccctttttccacaactctaataaatgggagagaaatgttcatctagaccatacaagtccctaatattatcagatcctacaatttgagctcctatggagcaaaacaatgtgtgtctcctagagagggcatcagctaccacatttgtttttccctttttgtatttgataacatatggaaattgctctatgtactctacccattntgcatgcctcttgtttaacttgctttgccctctaatgtacttaagtgattgatgatcactatgaatgacaaattccttggaaacaaggtaatgttcccaagtttggagggctcttattaaggcataaagctc

SEQ ID NO: 36010 - DNA, 402 bp, Glycine max
  unsure at all n locations
agcttgactctcttctttacatggcaagttcaacacactttcagcaaatctcttcacaaataactatcacaaagcataaaccaagtaaaactacccatcatatctcccaaagccccatacccacgaaaatttatgtgagaagaagtctacccaaacctgagatttcgaggtcccacacgtagagatgcacttcacgactccgaaaatgccttccttttgcgatttggagcagaaatggtgaccaaaggttggagctttaatggaggcttcaatggagaggaagaagaaagaaaaagcaacgtgagggagagggagaaagcttctganatcttctggtgagtgaggagagagagaaaacagctctttgggttaaagaggcttttctcttttctattattttat

SEQ ID NO: 36011 - DNA, 428 bp, Glycine max
  unsure at all n locations
agcttaatgtctttttccatattcaaatcagatcagtgttttgaaagttgttcttttatcaagtccatgcaaaaacatctgaattcatttggtttttgggaaagtccttcattgttttcaaaaattcttttgctgtgttctgataaaaaaataagtttaaaaaaaaaatatactagttgtttgattctttcaaagtatgttatgttcaagaaaaaattttctttttaactcccagaaagagttataatctataactatactaacaaaatatcaaagcacacacaaattagtcaaaataaactcgcgtaagtaaataaggtaataaagtactgaatnttaatacaaagcgataaataaacataaagataagttcacgagtttgtgaagatcatggctgaggcactcagtctcccccaatgaaacaaaca

SEQ ID NO: 36012 - DNA, 434 bp, Glycine max
  unsure at all n locations
agcttgtcgtttgttgacattntaactttcttaattagacaaggcatgattgatcatgctgtgtgatgtgtatcagtctatatgtacatgtacaatttctctcaatgtcaaaccaaatttcgtaagctaaatgtgtactcaatttttaagcatatgctacaaaaatcaatactcatcacaacatataccctcactgccctttaccaaaataaaaacgtgtactcaatttttaagcccatgctgcagaaatcaatgctcatcacaatatattccctcacttcccttttcaagataggcacatcaaaacacatgatttatgtaatggagaatggagatactatagctgaattcttatgacgtataaatcgatttaaggtagcaatttccatttttctttcctgaagagttgagttcagtctcagcatctatatata

SEQ ID NO: 36013 - DNA, 367 bp, Glycine max
agcttcatgttgtcgaatcaagattaattcaagttgttttgatgataacaaagatgatgacaaaaagctcaagagaatgatttcaagattgagtcacgaacaattcccatgagaatgatttcaagattgagtcaagaacaattcaagaatcaagagagatttgatttcaagaatcaagaatcaagaataatcaagatcaagattcaagactcaagattcaagaatcaagagaagactcaatcaagataagtattaaaaagtttttcaaaacattgagtagcacatgaagttttcacaaaatcttttaccaaagagtttttactctctggtaatcgattactagtttactgtaatcgattaccaatga

SEQ ID NO: 36014 - DNA, 328 bp, Glycine max
agcttgaatatatgttttccacgccagcacgcacttagcgcgtatgcagcttgctaagcgaggcgattgtctcttctgcgctaagcacaagattgacgctaagccaaatattacttacctgtgctaagcacgagaatggtgctaagcgcgccttcaaggtcagaaagccctttgtaagcctgatttgcacagaaaaaaagacagagggtgacaacgtgaaaaaggtcagaattgactaccaattatgtgcagagaacagaggaatagttgagcaatgaagcaaaggccttaacttttaggtagattctaggttttaaagatattttct

SEQ ID NO: 36015 - DNA, 202 bp, Glycine max
tttaaaattaacacctatagttatgtctatctcgaacatttatgctcacctcttaatacagcacattggtcctattgatcacagaatatccacacccaaggaactgtagctagagagtgctaatactggaggctatatatgcatttacttatatgcctatgagattagatcgatagatgacatggattatgttcaacgattt

SEQ ID NO: 36016 - DNA, 327 bp, Glycine max
agctttatttgtgcgggtctgggagacgaaggtcaagtgtgcgcgatatgtgaagatgatgttccaagtactttggatttggtccgaccatgccctcctgatttccagctgggaaattggcgagtggaggaacgccccggcatttacgctacacgcataatgtaaacctttacggttttaaaagctctatattggggcctacgctttagagacttcttttcgataaggctttgcgtgcttcgttttgaattgataatacaaggatctttcttcatctgttcctagtctctacccattctcattcatttgcatgtgtacttctttttg

SEQ ID NO: 36017 - DNA, 442 bp, Glycine max
  unsure at all n locations
agctttgaatgctctattcaatggagttgacaagaatatcttcagactgatcaacacttgcacagtggccaaggatgcatgggagatcctgaaaaccactcatgaaggaacctccaaagtgaagatgtccagattgcaactattggctacaaaattcgaaaatctgaagatgaaggaggaagagtgtattcatgacttccacatgaacattcttgaaattgccaatgcttgcactgccttgggagagaggatgacagatgaaaagctggtgagaaagatcctcagatccttgcctaagaggtttgacatgatagtcactgcaatagaggaggcccaagacatctgcaacatgagagtagaagaactcattggntcccttcanacctttgagctangactctcggatagggctgaaaagaagagcaagaatctggcgttcgtg

SEQ ID NO: 36018 - DNA, 416 bp, Glycine max
tgcatgccagcctctattgcttttattcattcttacctggggctatctcaaaccttgtatttttgttgtctatgatattgcatacacctccttcagagtgaagtgtgtagcctctctccatcatttggccaatgcttagaagattgtcttttaggctgggaactagtaagacatcatggatgagtcgcgtacctttatttgtctccaccatgatagtgcctttgccttttgattcaaccacacttgtatttcccagttgaactatgactttgacagactcatcaatacttttaaaaatagtcttatccttggccatgtgattgctacatccactatccaagtaccagtttcctcccttttcttttatcgagtcttgagtggcgtagaacgtacattgttcttgatcatgctcctct

SEQ ID NO: 36019 - DNA, 306 bp, Glycine max
  unsure at all n locations
agctatcatcatcggtctcaatactangcacacctctctctcgcatcgtgaaatctatacatggaagccaaagacttgtggcgctgactagctcttccaataggcgtggtactaattatacatatcactcaagttcccaacaaagaggctgtagactgcaacctttactcgggatggtgcaccacaaagaaccgcttctactcttcaacacatcctagtaaccctgattagacaccgtcatcattgtacacatatcatcacaaccaacaccatgatgaatctgatatatctgaacaccctcttgac

SEQ ID NO: 36020 - DNA, 410 bp, Glycine max
agcttcatatttgatttatgtgcaaccatatcccttaaagtcctctcacgaggtggaggttgtgccatgttctcagaatgtgcatgatcagaatgctcagaatcagaatgctcaatgaaattctgataccaatgccagatgtcgtacaggatgtcacgacatcacgcttcagaacatgcagattatctctgagtgtatgaacagattaaacatgtctataacacacgataattgctaacccagttcggtgcaacctcacctacatctgggggctaccaagccagggaggaaatccactaaaatagtgttagttcaaggtctaacagccactatttacaaccttctcacctaaccactacccgtgcgacctctacctatgagccactcttatatatgagaacccctctcac

SEQ ID NO: 36021 - DNA, 428 bp, Glycine max
tccatattgctgtaaagaagaacagagatctgtatggtgatctgcagaagaacatagaccacagactcttacaacaggtgtagatttctgattcatggcaagttgagttactatgttgaccaagccatcaagttttccttcaagctttttattttcagtagatgaagatgaatccatggccacctcatggactcctctaagaacaataacatcatttcttacactgaattgttgggagttggaagccatcttctcaatcaaattcctagcttcagcaggggtcatatcaccaagagctccaccactggcagcatcaatcatactcctctccatgttgctaagaccctcatagaaatattgaagaaggagttgctcagaaatctggtggtgaggacagcatgcacacaatttctttgatctttcccagt

SEQ ID NO: 36022 - DNA, 375 bp, Glycine max
agcttcatctatcattcgctgcaagcggcgtgtatggtctcccatggcggatgcgaaagggacgagtgtttgtttcacctcggggagtcacacgacatggaaacctgtcccgcagtagaagaattgcttcaacggctcatggactgggggcagcttgaagtgtccaaaggagggaaggaggaaccacatatttgcatgtagtgggaagaaaggaaggttcccttaaccccccaaggccctagtaatatgttttactaggaaagggaccggctccacacccatatacccccggacagcgcccgagccaacgccatttgcatatcaaagtaataacgccgttccgtggaagtatacccctcccgcgttcaacgaaag

SEQ ID NO: 36023 - DNA, 431 bp, Glycine max
  unsure at all n locations
agctntcatctctggtctcaatactattcacacctctctctcactcgtgatatctatccatggaggccaaaaacttgtggcgcttccttgttctttcaatcggtgtggtactagttttacttgtcactcggcttcccaacaaggaggctctagactgcaacctttactctggatggtgcacctcaaagaaccgcttctactcttcagcacatcctaataacccgattaagaaaccatcatcattttccacatatcatcacaaccaacaccatgatgaatctgagattcctgaacaccctcttgaccctctaaccatccaagagttcaacaaggtccgcaccatcctatccaaccaccccctcttcaagtcctcatccacctacactctcaactcagttgtccttgaagagccagacaaaaagctagtcctc

SEQ ID NO: 36024 - DNA, 373 bp, Glycine max
gttgagattataactagctagttgtagtcttgtgtagtagtagcttgtatctgagaatataaatactttgtaacacacactttacaaatcaatcataatatttttttcttctttcatcttcattctctatttttctctcctctgtaactgaatcctaaccaactcaacaccattctttctcaaaatcgttattgcatcctttagggtcctttgataaatgtgtttggatctatgttctttggtaagtcccattctttgcattgaaaggtgtcctattgaccttaatggggggtctctagtgacttatatggattatatgatcattcttttactattagatgatctcaactaggcttctctttatcgattgact

SEQ ID NO: 36025 - DNA, 335 bp, Glycine max
agcttgtactttctcttgttgcgctataaaccatgcacattatatgtctgcatcccatcatcatgcactgcactgccaaatgttgcaagtaagaagagataaattttctgggctctcgtgtgcataaaatacatttgtgtcatgcgccgaataagcatctcttcatgcatccattccatgatagatgttgaagtattgattcaaaccggatttttcattctactaaacatgggatcaaatcaaacacctcttctcaagataaggttctatcaagtcaaaatcaagagcttagaggtcactagtttacgagagtgggggcaattaatgggtcaact

SEQ ID NO: 36026 - DNA, 396 bp, Glycine max
atattattggggggttgaattaatacgatagtggatcatgctatgagaaaaaattaccgaccacaggacattaaaagatatagacttgttatgatgatgtatatatacgtgagatacatggttacttgggttgcttaatgtgcaatacatacaaaactttcacacatatttctaatttaaataaatccaataaattttccaaactaattatttgtagatccgttttagttattttaaattagtataaaaatatataatgttgcaacgagttgcaaacacaaatattatgactatagaccaaaatagaagctaacaaaatcaaatactaatttatttattttgctaacaaattatattgagaaatagaggatgtcaagctaatctttaactctacta

SEQ ID NO: 36027 - DNA, 435 bp, Glycine max
  unsure at all n locations
agtggtatcttcttttgttcgtacatcctcatgcacatcgaaatgaaaaagctgtacagatagaaaaacaagtaattgtaacaccgcaaaattaatcacaagttaaataggggacactttcaagtttataatggcatgcaaatgttatttagggatgagatacttcagatgatatgccattttgaaggagcatgctagcatataaacactacaacattgaagcattatcacaagataaaacccagcaattatcagaagaattccaactggtcatgactcatgagaactgaatgttgtcatgtaaaccatcacagttaagttcattgcagaagatcggacatgagaatntattattaattgtntttcgacttagtatctctaataccatttgtaanaaggaaataaatttgtgaggggaaaaaagagacatgcttg

SEQ ID NO: 36028 - DNA, 434 bp, Glycine max
  unsure at all n locations
agcttgttgttttgaatccaatntatataatatatggtccgagtcttcttttcatagataatctattaacaccatttaaatcccttggacccaatgacagaccataatttatttcatgcagactagaaagacatcatgcaactaaaaaaataatagatacaaattacttctttcatattgatgcataggaagatttcttaaatacaatgtatatagccatatcttcatttacaattacaaacaatgctacagaatatggacaacataaaactaagttcctgaccaaagggcctaagcaaatggcaataataaacttatcaatatcatattcaaactgccagtgctatttcctattgcgattatgactcacatatacaacatactgtacagatgacatgatagaaccacccaaaataatggcaagcacatgctat

SEQ ID NO: 36029 - DNA, 455 bp, Glycine max
  unsure at all n locations
tgccttccaacctaaagttttttttatggttcgccaccaaaaatattttctaattagtttttatgcttgtctcatgaattgacatcaccattagtttatctacaattgttttgttctttaccagaatatgtgcttatgatatttttgtgattatccaggccaacaatgttgacatgtacataaatgggcatgaccattgcctccaacatataagcagcacagataggtaacgaataaacaaaaatacattctcccaatcaaactatatatgtggttntataaagtaatttcttctttattataccaatatcaaaatgcagcccacttctatatttaacgagtggagcaggatcaaaggcatggagaggtgatgttaaagaaacccactttgatgtgaaattcttttatgatggtcaaggtttcatgtctgttcaaatgactgaccatgacacaaa

SEQ ID NO: 36030 - DNA, 378 bp, Glycine max
  unsure at all n locations
agcttgacagcttgtgatcttangaggaaatactaatttgggatgcaattccctaatgtaacatatagtgtgctttcttttaaaagaaaaaatagatccagatatctaatcccaattgatattttaatccggtcaagaatattaactaaatgatgaaattaaagttctctcggaatttttactacaccctgtaattttaacttatccaccggatttacttatgtggaattttaattatatgcacgaataattctattcgctataataatgatattcaactctaatagaactactgtttgtaaataatacatgtgatttacaacaatataaacttctaagaccttatttatagacatgtgagtacatattactattact

SEQ ID NO: 36031 - DNA, 372 bp, Glycine max
  unsure at all n locations
agcttancgcnaatcanaaagtctcanaatcttaatgtctgagcactagtcccgctagcacacagacgcgcttagcgggctcatcacttacattcatcagcatggatgaacgcacttagcgcgacatggtccgcttagcccgttcatctagaaatccaaacatctaacagttgtgatgaacacgctaagcgcaacatgcgcgcttagcgcgttcatcacgatttgtaaacagatccacaggggtcttcacccctttcagccacattgcccctaatgggcttctaagttacctagaatcctacattgactaatgctataactaatagccttaacctatcaacatacaactcacaaaacatgaagtcatctatc

SEQ ID NO: 36032 - DNA, 359 bp, Glycine max
agcttatctgttttgtccttcctcagtgtcctgaatcgatcatacaacaacttatcaggcagaattctcacgagcacccaacttcagagctttgaagaacttagctacactggaaatcctgagctttgtggtcctcctgtaacaaaaaattgcacagacaaggaagagttgacagagagtgcttctgttggacacggtgatggtaatttctttggaacatcagagtttgatatcggtatgggagttggatttgcagcaggattttggggtttttgtagtgttgttttcttcaacagaacttggaggcgtgcttattttcattatcttgaccacttgagagatctgatttatgtgataat

SEQ ID NO: 36033 - DNA, 443 bp, Glycine max
  unsure at all n locations
tgcaccaagctcattatttcacgttgtctcaatgagtggtttagtcattgcatattaggggttttgactttcttatgttgtggtcattgaattatgaacatggttcaatttgatttttcgatagggaatttgagttgtgcaatctggaaaccatattattttaaaaaaaaatgttaaaattaggtttaattattcatttggtcattatagttgcaataactcttcattttagttcctatagtttaaaacatctcatataattgtcatctttttctcttttcatcttcattgtctaaagtcacctaacgttgtttgagatgaacattacaagacttatcattgtcaaagtgtcaccttggtttcaaggtaacattnttgacatggcaagaacttgtatttattgaacaaagccaagaatgagtattgctcagcaccccacgagt

SEQ ID NO: 36034 - DNA, 440 bp, Glycine max
  unsure at all n locations
agcttctcacttattatgcagcatttcaatttgcaaaagagaacggcattgatcttgtgtcagttataacaagcactgttgcaggccctttcttcacggctaatgtactaacaagtgttaaagttctactgtcgccattaacaggtgattttatcattaatctacatcttattcgttcatacacattgaaatgacttattttagttaggtaactaccatcttagctaacttcgtccccagagaaaagaaagtgttatctattagtatgtctatgtatgtgttagaaatgaaagctatattactaaatgttatataagtgtatcaacattaagtattttatntcaataacttctattcaattcatgaatttgtgaacttcggtactatctcttatgccaagttcccncaatatattgtacctctatgcttctaagtgcatc

SEQ ID NO: 36035 - DNA, 433 bp, Glycine max
  unsure at all n locations
agcttgtgtctcttggcaatttctntanaactagtcacttaaaaagttgacttttgaaagaatcttcagaaacaagtcacttgaaaaattgtgacttttggaaatgtatttttcgaaatcagtcactggtaatcgattaccattaaggtgtaatcgattacacatcaacaaatgtgactcttcattttgaattttgaaaattaaaacatttagaagctctggtaatcgattacaagtattgtgtaatcgattacacaagtttaaaatactttaaaactatttaaacataagttgtaactcttgaaatgtgaaatcttaacattttaaaacattggtaatcgattactaccttctagtaatcgattaccagagagataaactctctggtaatgattntgtgaaaacttcttgtgcttactcaatgtttgaaaac

SEQ ID NO: 36036 - DNA, 398 bp, Glycine max
agctcgatattttatgaattctagatcaatattttttctgggtgaggtcttttgcttttcgactcgataattaggactaatatgataattctattttatgtcttttaaaaaaatgcagagatctgtatggaattactgatgcctatgttcccatcacaacgttttcaaatactgtactacttctttcagtttaacttctaaaagactatacccgataatttgaagtggagtttgggaatgagcaaaagttgctaacgatctgcgaatatttttttttatttccgctctagaaatcacgcatatagttgtcccttcagattgcaatattgggctcattgcatgttcgcattgcattggacaacttgatatatagcctaaccatgacaatggctatttgc

SEQ ID NO: 36037 - DNA, 343 bp, Glycine max
agcttgtttatttcacccatatgcttcttattggcttgtgggaccaaatcccatactacattccttttaaactcatttaattcatcatgcatagccaataaccaatgctcatcatgcaatgcttcatctatctttctaggttcaatatgagaaacaaaagccatgttattgcatacaattctaagtttagagtgggtggatactcccttagatatttcacctatgatgttttccacagagaggtctctatgagttctccactcctttgggagttctttatgatgtgtggcaatgacttacttgctttgttcaagatccttaaccattggttcatcttcaagtg

SEQ ID NO: 36038 - DNA, 434 bp, Glycine max
  unsure at all n locations
agcttgtttcttcatggaaacaatttctcagcccaaaagaatactggaaatcaagaaaccattcatttattagccatttaccaagatctatataggccagaanaagacattatttaagatcaaggtgcaaatagcggtcagtacccatatccacaagatatatgttatttggaacgcattctgcaagaaaaaacatatcagttaggaacaaacattataaacttaaaattcaaaactacagcaaagtttttctcactaaatgaactattttttaattaaagtcagctaggacatattatactatttatttaatagcaaatccgtcaacatatcttaaataatgtaaatgaactacntttttttaattaaagtcagaatataacaattatttactttaaagcgctatttgaaactggcaaattttcctgatcatg

SEQ ID NO: 36039 - DNA, 442 bp, Glycine max
agcttgttttttatgtaacaagtgaatacatttattatcctcaagataaatgaaaaaactcttattaaaccaaagtaaacgaaaagacttattgaactctaaaatttgttcaaatacattatgttgctataaaaacattcttttagcccaaaataacataattgagcataaatacatccatctcatgtataattgatagcccaagctcctcattttgagtattctttggtccaaaagttcttctatagtcccatctttagcccaaattagtgtaaaaatgtgattaagctcaaatttagattagagagaattatgtttgacctatatgtcttgaacaagttcatttaatgcttccttgaatctcttagtcattactcttgtaatgggtccatgttgcacaggatcccttaagcacttgaatatgctatgtctagctcttgat

SEQ ID NO: 36040 - DNA, 394 bp, Glycine max
tgagaagattcctagagaagctagagcttagctacacactttctctctaatagctaagtgcagctccttaagatgagaagctagagcttagctacaccccccctataatagctaagctcaccccatgacaaaatacatgagaatacaaaataaagtccctactacaaggactactcaaaatgccctgaaatacaaggctaaaaccctatactactagaatggccaaaatacaaggcccaaaagaaggaaaaacctattcaaatatttacaaagaagagtggatccaaccttggcccatgggctcagaaatctaccctgaggatcatgagaaccctagggccatctttagtagctctagcccaatcctcttggatccttctatccaatacccttg

SEQ ID NO: 36041 - DNA, 326 bp, Glycine max
  unsure at all n locations
gcttttgcnaagaactaacatagnngtctgatcattcctcatcgcaattgagggataccgtaggaagnncaaaagccccgctttttgtcatacccaccccaagagatctgttaatggtccaaccgccctaacgtttctctcctttcaaaaaacaagagatcgttaatggtccaacgccttaacgtttctctcctttcaaaatcaaaagatcgtttaatggtccaacaccttanatgatcttttgttcagtcaaaatatatcttgcaaacaaagatatatacaacttcaaccacgcttagttctcaaagaactacataggtttgatt

SEQ ID NO: 36042 - DNA, 261 bp, Glycine max
gggaaaggtactgtacgtgcaccaactgtcatcacgtctgaacgatttctattgttagaaacgggatgagactctccaacacgccattacggaattgacccatgcgatgcgtgagcctaacctggcaagtgtgtaaaactgacaaagctcaaaaatcgcttattgaactggctattcgcggcataccggcattctcagaaggtgccagatgcaacttgcaattacgttttacaacctcgcaccggatagacgcgatccacc

SEQ ID NO: 36043 - DNA, 235 bp, Glycine max
ggggaaggtgctgactgatcaaagcgggtgtggacacacgaggttttttgcccccaccttatggactgtccgaactctgtagaagacagtcggcttgtacctgctctccctccccccactcaccgatgagatgtgacgacaccagtggattatcacgcccgattagattctggggactacgacccaaggatgggctctcttaagctcgactatgcttgcgactggtagctaggtg

SEQ ID NO: 36044 - DNA, 230 bp, Glycine max
gtgtcatggattcaacaaaaaatccgcaaccttgatggcattaccatgctattgacgaaaacccacgtcatcaactattttgctaaatgcaagctttctccacattcaagaatgtcatcatcactaccaaggtgtctcttcaacaatgataagccagatacgtacatctcagacaacatttaacgacctttaatgaggataattatgtgtgtgcatgtgtgtgcgtgtgt

SEQ ID NO: 36045 - DNA, 433 bp, Glycine max
  unsure at all n locations
aganaaagtggttctactcttaacggacanttngaaaanacggcggaagagccnngaacgaggtgggggagcgctgatctgttttgggagganaaacagaggcgtgtgtggagagaacactctgtgtagcacaacactcggagttctacgtggataggaacacctcactggcaacccaactgagctgcttagagacaaaatatgcgctacgtgagatgtttaagtatggtgccgtgacatgtcacaatttgggtcttgcatctatatctaaaaaaacccgtgttcacttacatctccactctcgtttgtgaactaactatgtggggaataatgttactttcattgattctgtaaaactgatgtaattatcttttcacctcgactttcagaaccgcactttgaggttgaaactcgttatttaaacaacgtcggc

SEQ ID NO: 36046 - DNA, 379 bp, Glycine max
ggagaaccaagccaatcagaatgctagacgatttatagatgtgaatataggtaacaatggcggtaatgacggaccgaggcagaaccgggttgagggagtaaagctcaatgttcctcccttcaaaggtagaagtgatccagatgcctacctggactgggaaatgaagactgagcacatattttcctgcaatgactacactgatgcgcagaaagtcaagctagcagcagctgaattctccgactatgcccttgtttggtggcataaataccaaagagaaatgttgagagaggaacggcgagaggtagatacatggactgagatgaaaagggtgatgagaaaaaggtatgtgcccactatctataacagaaccatgcgacag

SEQ ID NO: 36047 - DNA, 426 bp, Glycine max
  unsure at all n locations
tatttgatttatgtcgtaagttagggggtgttttgttaacgatttgtttttactttntccgaattaaagtgataaattattattattattattattattattattattattattattaaaaaattatcagacaattataatttttgagaattaattttagttcattttcctaaaaaaatatttttaaagaaggaaacaaaaatctaacatttttgtgtggaggaaaagttctagttatgtattctacatgaatatttaattatcatgaaacatattaagattagtcaaatgtattttatacatttctaaaaatcatatggaccttatcataaatcatgtttcctatgtatgaaaaaacacatcccatattaaatgtcccattatagganaggagatannaaaaaagtgggtcatagatcacatatg

SEQ ID NO: 36048 - DNA, 236 bp, Glycine max
  unsure at all n locations
gcgcaaacactgaagagaccggcgggtagcaaactttcatcaanaanaaaatcatgacctttcgagcatgatatacaatccatgttggaggaatcatctcaatctgagatagacatagtnctccactacaacatcagcctgtccctactttccaaaatgctactggtccaagcaagccatatgttccttctcaaatgcaacaactacatgtgcattcacaacaaagacaactagca

SEQ ID NO: 36049 - DNA, 408 bp, Glycine max
  unsure at all n locations
ntgagggtgcgcagcccaccatcttttcatagtttagtactcttttatgtgtctaccatcacgattatcgtctccctttccattattgggggtaccacctgngccgccagatccctccaccttttgggcgtgttctttgaatgatccgtccccctttttgcacatgttctgtagttgcatcctatccggaaccatatcaaaattgtactgatactgcctaacaaaggcaaccattatgttcttccaagaatggactcgggaaggttccaagttagtgtaccatgtaacagctaccccagtaagactttcttggaaggaatgtatcagcaattcctcatcttttgcgtattcccccatcttctgacaatacatctttagatggttcttgagacaagtaatccccttgta

SEQ ID NO: 36050 - DNA, 415 bp, Glycine max
  unsure at all n locations
gggaatccattgttggggtacattgatcatatagattttttttaatagcnaagtaattaaataactgngaaattgtatcaattattcttgttgaagcacacctcttataatattagtgtgtgagccctgtaacctgtgaattgttgcatacacataacgagatttgtgcattggtcaccatttttttaattcttgcattgtaagcctacacgggtctttgaagcagtttaaaattctcatgcttttcatcatctgtttagaaaataatctgaatgatgagtaagatacattgtttgaagtgtcttactagcctacaaagagagaaaaaatagtgaattttgtttgcatgcagtattttatttcttattagagacaaataaatatatacacacacacagacagagaaagatgtata

SEQ ID NO: 36051 - DNA, 438 bp, Glycine max
  unsure at all n locations
canattcacttactcacgctaagcgtgataatggcgctgagcgtgacgacgagatcaggaagccttttttaagcttgatttgcatagaattgaaggggcagccaagagaactattcactactcagaggcttgaagagtgtgaatttcagatagcgtagagtagagcaaggggccaagttttcatcttttagggagattagtgagtttttaagtgattgtgagattcctagaggtggagggtacatccccactcctttgtaagcaagcaatttctcttgattcctcttcttcagtgtaaaaggagcttccttgccatgaaaggctaanaccctcagttggggattcttattgagtagtngatgtaaactctttttcatatctaattaaggttattntatgtggtcactacttctatctatgcttattgtatgcatactt

SEQ ID NO: 36052 - DNA, 398 bp, Glycine max
  unsure at all n locations
tcaagctntcataagtgaaatcaggtgcaaccatttccctaagagtcctctcacgatgtggatgttaagccatgttctcagtatgaaaattaatagttgaatgctcaaaatcagaatattcagaatcaccagcaatagaatactcacaatgctcaaaatgctcacaatgctcaaaatgcacagaatgatcaggatgcacactatgcctaactaatctatgaaaggttctatctatttcangatcaaagggttgtaaatcacttggattgcccctagtcatgcactatatgcagcaaataatgtgttctcaaacaagcactatgggagggttaaaactacaactatagtcaaatgatatccaaatgaactgaaattttgtgagcaacaccctcaaatca

SEQ ID NO: 36053 - DNA, 272 bp, Glycine max
  unsure at all n locations
agcaaactgcccattcttccgatgcatcctatcaagaataaaagacagccctanacagaacatataataaattatatatatagaagaacaaatcatacttcaaaaacaacctgcaatcaaacaaaacctacaagaatcccttcaaatggcactcaagtaccaactatcaacacaacacattaatgttctcagtccttagctgttgagaaatatgctcactgatttgactttacctgattacaactcaggcctaatatttcatgattaaaaat

SEQ ID NO: 36054 - DNA, 358 bp, Glycine max
  unsure at all n locations
agagggaaatagtcgactcgtanacgatgtcaacnanacnggaattnagcaangcctaagcggcaacggttgtgtttttttgcaacaaaggagcttgggggtttccccccaacaaggggataaaaacttacttgagaagtcaatatcgatctcaaccgcagggaaaaggggaggaacctccattggaaaatgagttcaaaatgggcatgcaagacgggggtctaccatcctttgcccccaaaacacagcgtagttcttaaaaaacacttgcagaccaaaacccgcctgggcacgggaagcccttatacctctaaacatataggctgtggataatcctgttatggaaactcaacagcgg

SEQ ID NO: 36055 - DNA, 316 bp, Glycine max
tatgtcgtgtgggtcaggagaccttgtggacgtcaggtggtgtgctatttcccaaaaccaatcttgaccaatcccgacccaacccaggcatagtcggtcagtgagaacctgtgatgtacctaaacatgcgagctcctggcagtcaacagattaaaggaacatagaccacaaagcattgatgcttgtgtgtgggctggccaactgtgaatcttgtgtgatatatgggttatggcctctggtaatcgattaccaagggtgggttatcgattacaatgcttaacaatgaagacaagaggcttaaatggtctctggttat

SEQ ID NO: 36056 - DNA, 509 bp, Glycine max
  unsure at all n locations
cggaggcaaaananaaggttgagaccttgaaaatctagtcannacggnaccnatacaanaataagcgaagtcaggggcagccatcgcgcctaagagtccttctcacgangtggattttgagccatgttctcagtatgaagattagcagccaaatgctcatcatcagaatgttcacaatcactatcaacagaatgcacagaatgctcataataataaggatgcacactatgcctaactatctatgaaaggtctatctatttcagatcaaagggttctaaatcacctgaattttccctagtcatccactatatgcagcanatcatgtatttctcaaacaagcaccagggtaaaaaggggataaaacttcaactatactcaaacgacattccaatgagcttgatatttgtgagaaacaccctacaatcatgaaaagatagcacaaatattttcaagaaaaattctatgtttactatgaaactggctatgaaatttataaaataaaacatact

SEQ ID NO: 36057 - DNA, 436 bp, Glycine max
  unsure at all n locations
cttgagacgcatgtgatcctttggcatcatcatatcatcagcttattccttngnctacaatctcccgctttgtgatgatgacaatccctgaaatcaagacaagctatatacaagatgatagcacgttcacacaacccttactccccctatcttttgccatgtatgcctaatgataaatttctaattgatatctaacccaagtcccaagttctctcaagttctctccccctttggcaacatcaaaaagaactaagcaacacaatctaaatccaaacagagcaaaacaataaaccataataaatccagacattgtcataaccaaccaaatcaaagtcaagagacataatataagtgcaagattacgataactaagcaataataagccaaatacacggccgataaccaaagtactaataatccttaattaccagtaata

SEQ ID NO: 36058 - DNA, 198 bp, Glycine max
  unsure at all n locations
tagggatggaacacttacttgttggtgatgaacttaagcgcataacttaatcaaaaaatgcgaanaaggatgaccctatggctgcaaactcgtcaatcccgtgggtatggcttttgaaaggggggaaaagaagtttttgaatgcaaaaacgtcccccctttcgtcattcttataatttggtgcaggggtggctcgccc

SEQ ID NO: 36059 - DNA, 423 bp, Glycine max
atagaaactcagctttgctgcaatatttacaatagacctcctcactctcagctgtataatcaaccacagcatagcagttatgacctttccagcaacagatacagccctggatggatgaaccaccctaacctcagatggtccagccctcagcaacaacaacagcagcctgctccttccttccaaaatgctgctggcccaagcagaccatacattcctccaccaatccaacaacagcaacaaccccagatacagccaacagttgaggcccctccacaaccttccctcgaagaacttgtgaggcaaatgactatgcagaacatgcagtttcagcaagagaccagagcctccattcagagcttaaccaatcagatgggacaattagctacccaattgaatcaacaatagtcccagaattctgacaag

SEQ ID NO: 36060 - DNA, 173 bp, Glycine max
attgctcctagacgaggattctcatttttaaatattgtaggttaattacgttattaccgggtccatgaacttccgaggtcgatccttcattgattgccctttgtatgctgacgacataatgctatggaattttttcgtatgcttttgctttttgatgcaggatttaatcacta

SEQ ID NO: 36061 - DNA, 431 bp, Glycine max
  unsure at all n locations
gcttataacgcgtctgggagacaaagtcattctttccgtatgctaggatgatattccgagtactttggatttggtacgaccatgccctcctgatttccagctgggaaattggcgagtggaggaacgccccggcatttacgcaacgagcataatgtaaacctttacggttttaaaagctctatagttgggcctaggctttagagttnttttccttctgttaatgctatgtgtcttctggttttgaatttataatacaaggatctttcttcatctgttcctggtctctacccattctcattcatttgcatgtttacttctttttctgaaacggcagatccgatgacgagtcccccgaaggtactaatacctgngacccgcctatcgacttcgagcgagaaatgaatcaaacggaagatgaatgagatgaggat

SEQ ID NO: 36062 - DNA, 441 bp, Glycine max
tagccaattctactgcctggggcagagtatttggtctttgttctggacttcgcgatggagctctggattcaggccatacacaaagcccttgacaatctccattgataggcaactaaatacatgcaactggaggagctcaccaagtacaaccggcagttgaggaatgaagcatccgactcaaagaaggagttagaaagggatgcccaataaggaaaaagaacatgcacgcaagactagaggacctttctacaactattacactccccttaatgatagccaatcaaggatcttggaacaagcccttgctactgaatttttcatgatgccaaagcaggctaaccccccctaagagccaaccactcaaagcatttttgataccatacgaattgtggtcattcctcagaagaatgcataacacataaatacaagattaatgatcta

SEQ ID NO: 36063 - DNA, 436 bp, Glycine max
  unsure at all n locations
tataagaacaaaattgcctaaatcatgcttctaatatgcatctgatttangaagcatcaacaagaatcaagccaaggctattgtgcaagcaatcaatggggcataacacaccaaaagattatgatgatggatggctcanattctcacaaaggtaaacttatcactttcaaattgagctttcaaaactatcatgacatgtagaggaaacacaaggatttcaaatcataanatgtcaagagacttttattttcagaacaattacccattacttgaacatatnctataattcaaagaaaaacatgcaaatntaacacaacataactaacaaaattaaactagaacccaacaaaactaacaaaattaaactaatttaacacaactatcanaaccataaccaaagaacacttccccccccccccccatacttaacaacaca

SEQ ID NO: 36064 - DNA, 457 bp, Glycine max
  unsure at all n locations
agcttataagaacaaaattgccttaatcatttccaaatatgcatgtgtattangactcatcaacaagaatcaagccaaggctattgtgcaagcaatcaatggggcaaaacacaccaaatgattataatgatggatggctcanattctcacaaaggtaaaatcatcactttcaaattgagctttcaaaactatcatgacatgtagagaagaatcaaggatttcaagtcacaaaatgtcaagaacttttattttcaaaacaattacccatttcttgaacatatcctataattcaaagaaaaacatgcaaagtcgtacgtgcacacaaaattgacccanaatattaaactgaanatccgaagaaactaacaacattaacaaattaacacaactaacaaattaacaaaaccaacaaaactagcaaaaccaaagaacactcccnccccccccccccatactt

SEQ ID NO: 36065 - DNA, 454 bp, Glycine max
  unsure at all n locations
ntnggttacgtgtcaactttntatatgtacgctnttattnttttataaaaatattaaganatnaaattaaatgtttgcattttcaagatacgtaataccgaggcgtcactttgatcgatgcattttgaagggtttgcttcaccaactgaagggtttcagtgatacacttctattctcatcctctccgtattccactttgacacaaaaattatgcatgcatttggctgaagtttttttgctgggtttgacagttttttgcttagtttggctganaaatgatttatgggttattttatccaatcccattttgaattcaaatgtgtaactgtttgagttcaaatgtgtgactgtttgagttcaaaagttgatttgaataaatgcgccgctacaggtattgttgaacatccaaatccaatttgaattcaaatgtgtgactgttngagtgaaagtcttg

SEQ ID NO: 36066 - DNA, 333 bp, Glycine max
  unsure at all n locations
agaacgagtggacacacgacctcanacacanacnaggncnaccacgaaagggagagaactacactctttaaagacaaagggacggggggaggagacccacaccaggccgaaaagacgaaagggagaagaacacagacgagagaaaagagacaaaaacgaccacaaaacacacgagggaacacagccaagcggcgaaaaacaagccacccgaaaacacacgaacaacaagcaagaaagggaacacaagcggacacagagaacccgaaagcgccacagaacaaaccgaggcagcggacacgacgaaaacaacccccccaaccacacgcagcccgc

SEQ ID NO: 36067 - DNA, 440 bp, Glycine max
  unsure at all n locations
aactcagcttgctagcgttgtgcgagacggagaccncatgctagctatatcgccttttaccaaaagagtaggtctagccgcggcccacgagcatatgattgcggacgaatatgcccaagtatacgcggaaaaagaggctagaggaagggtgatcgactctntacaccaagaggccaccatgtggatggatcggtttgctcttaccttgaacgggagtcaagaacttccctgattgttagccaaggccaaagcgatggcagacacctactccgcccccgaagagattcacgggcttctcggctattgtcaacatatgatagacttaatggcccacataattagaaatcgttaggaaacttgtatggtctctcagaccttgactagatatgacttcctttttgaaataaaatgagttggcccatgttctactccaaaaaaac

SEQ ID NO: 36068 - DNA, 510 bp, Glycine max
  unsure at all n locations
ggggagtnnnnannagaactgaggcttgaangctnngcannacgagacacnanacangaatggatcggcncgctgcaacgagagagggcanacaagacatcgatatctctgtcttgnnnagnnaaaaggagnaaagaggggagaggaatgangacnaatctacacagccggctagggaaagacaatgactgacggatataagttcaagcaatagaattgactgctactcctgtttctcaatataaaagatagagagcttcactccttgacgatgtgatgactaatcactctctaacttcagaaggaaagtagaagtggcccctagatattatgaaaagaaaacacaagcaagggatcaattaacaactaagccaaacagtacaggatggctacatacgccgcccaaatcatttttagctctgaaacagaatcatggcatgttntgaacattatgaactacacatanaagaaacagcacaaatcggttgctgccatggaccgggaaaaaag

SEQ ID NO: 36069 - DNA, 396 bp, Glycine max
  unsure at all n locations
tgtnataaagnnggagaatgcacaaaagaatattgtactnctctctaagngagaaaccctaagtgcagatatatatagcaacctattatctgcattctaaaccataaaattttaatgagcattgcattatcaagagtcaaatgctgaatttcaagggcaaactaggtgaatacctgacccccacactataaaccttgcattaattctgactaacagataatctaaatgaccacaaatatggcattgtaaggacaaagtatagtcacaccaataacagaccatcgatctttcaccaaaatctatgtgttcaagcattctagatatccaccagtaaagttaaaaatgaacaactatgagtttgacgtgaaactgattcgccattggaggtttatttca

SEQ ID NO: 36070 - DNA, 447 bp, Glycine max
tctacttatgtttgtgagcttcatgtaattacttctgcaattctcatgtggcaccactactttgtgggtcatcctttcatcatcctgactgatcaccaaagcttgaaggacttaatgacccaagtcattcaaacaccggaacaacaagtctatctttcaaagctactcgggtatgattataccattcaatataaatcagggtcttccaatatggttgcaaatgctttattaaggataccggcaacaccgaccttgtaactattactctccatccccaattctctttttatggaacaatttcgtcaagcatgtcaggcgaattcctcatatcaggaacttttccaccagatacatctgcaccccgaagctcaccccagcttcactattaaataggacctccttttcttcaatgataagatttggcttccttccagccatgatttcact

SEQ ID NO: 36071 - DNA, 279 bp, Glycine max
  unsure at all n locations
gccgagataggatcgaaagccctgctggcaatccttgattcagaagtntcaggggtgctgcgaatgccttgttgggaaggttgaagtcatctgaaggaatgaagaggctgtggaacataatcaagcatgggtgatgtgtgggcgcgactaggtttgaataaaaacctataggcactgaggttcaaaaagaagctagaggaaaggtttcagcgcgaaagggcaagatctacttcatccaatagctgctaacactagggttagaagctacaaccaatgttt

SEQ ID NO: 36072 - DNA, 407 bp, Glycine max
  unsure at all n locations
tactcagcttcgctcttgaacgggcgctatcctatcctatttctannncttttttttgtaanangnctaagggcgcgtttgcggccttgtcctgttttttgtccttgctctatcaaatccccttatctagattctcctctaaattctgagcgttttgatatatagtgggcctcaaatggacaaccataacaaaagttatgagcatttgaagtttacttgccctatctattgacatatctgttatcctatctaatatcttatctgttatcctatctaatatcttatttgatttccgatctattatcttatctattatcctatctaatatcttatttgatatcatatctggtacccaaattagagctatctgctatccagatccaatctaatatattattatccaaatc

SEQ ID NO: 36073 - DNA, 352 bp, Glycine max
  unsure at all n locations
gattcaatcttgaacatcttgaactcattctttgattcttaagatcatcatctntgttatcatgaattgttcttgatctttgagctttntgtaatcacctttgttgtcatcaaaacttctttgaatcaatcttgattcatcatgaagctttcttctacaatttcctcatcacaattgaggaatacgtatgagcaagggaaacacccttgtcgaccacaaaaagataaaaaaaacacacaaagacataaaaaaaaagggaaacaaattgaagtcatatttgcacacttgattaaagactgtcgtcccttgtgacggacgcgtggggtgctaatacccttcctattcgtaaata

SEQ ID NO: 36074 - DNA, 441 bp, Glycine max
tcttatccaaggcactctcttggtggtgaagctccttcttcctcggcatattccctagtggatggcgcctcctctcacctcttctcctttatcttccgttgcatctccatggtggaaaatcaccattgaaggacctcattgaagcttaaaaatccagcctccatagaagcctcataagcaagcttccatcatgtgctccttaaacctctattaacttccattgttgtttcctcatttttttcttgtttctttgtctaactcatttgttcacaagtgtatgaaattcttttagcctattaattgatttgagacaaatcttgcatgttaattagtccttaacatgtccatgcaaaattcttagagagtctttgattgtgaaccttttcttgaacttttaggtttccttatgattgtgtctatggtgaatttgagttttggtca

SEQ ID NO: 36075 - DNA, 410 bp, Glycine max
  unsure at all n locations
cgggganaaagaggtgatcctgctgatccttgcanacggagaatgatatgacccgagaacctagagcatggcagcttgcactctctgtctgatcaaaatcgcacagagcatatctgggtctagtacgttgccacacctgaggacacagacttcttgaacactttgcaccaagagcactctctggtatgagcctcgatgtataaactactcacacccacctcgtccgaaactgatttcaccttgagccctgacctattatgttgaggatccccgatcttaagggaagtcctacacagacattactgcgatcatacctgacgatgtggtcacgcggcattgttctcctcatgaacagacaccggttctaacattacacagcgacgagctcgacagccttctataaaggatgg

SEQ ID NO: 36076 - DNA, 474 bp, Glycine max
  unsure at all n locations
aggaaagagagatcgatcttgtacgacaatcttcanacccnnaaanagnnnnnnggcgagnngaggggggagcgggaggttganacctagcttctgaaacaanaaagggacacgggcggcgcacgagagaccaccacacaacccaccccaccccgagggcggggacaagccaccacagaacgcagaaggggcgcgcaaaagccgccgcccgnacagccccatgagccaccncccagcaggggccgccgaaaccgacaacaacacccattggagggaccgcaaccatacccgccgcgaagcacaaccgcccggtcaccgggagcgagagaccacccgccacacagggaccgaccaaacaccggcggctgagacagcagacacacggcaccggacacctaagacggcacggaccgccacgcacgcaagacaccgcgtgccccaccagcaaccgacgaggaacgacgcgcgcgcacg

SEQ ID NO: 36077 - DNA, 430 bp, Glycine max
  unsure at all n locations
cttctacgtctcttccctataaatagggagcaaagggaagaatatatacgttcatcctttctggtatctgaggatcacttgaaattagtgaaaaaaaatcgtttccgtgaagaaaatccaagccgaggcgcttccgtaacgcgtctganacgtttccgtgggtgattccgtgaagattntccgccatctatcgttcgttcttcatcgttcttcgtcgtcctgcggtcttcaaccgataagttcccgaaatcgaacttttcaattcattctatgtacccttggtggttcccacttgtttcgcgtacttttattttcatttcatttactttctgtatccccttttgacgtgctttagtcatttatataagtcattttctcgcctatatcaaaaataaaataatattccaccgatcatataaattggtacatt

SEQ ID NO: 36078 - DNA, 437 bp, Glycine max
ttacgtggcagggcgggcttccttcactttcttgtctctaacgcgatctttgaccaccgctcttccttcctgcgatgcttctcttcatatctgcctgagtgggcttatagcctaaaccatacttcccatgatttcctttggcatttatcaggctagttatgccgccgttgtctttgcctaaacccattccgggttcgtaaccgttccccaacataactcgggccatcattactgctgcatcggacaggcaagcttgcccagagaaggagtccacggaggaaatgcttaccacctcaaaagactggaaagcggtttctaatgactcctctgcggcctccacataaggcatagaggatgggcagctcaccaagatgtcttcttcgcctgatacgatgaccagatgcccttccactacgaatttcaacttttggtggagt

SEQ ID NO: 36079 - DNA, 385 bp, Glycine max
  unsure at all n locations
agatactcagcttgcaccagctcgcccagcgagcttgttgcttctttcatangcaccgccttctggtagaacttcctggaaggcccaagtgggtctggttgctatttgcaccccccttgtttactaaatacaccccctgcctttnttgctgattctttttccgtaacgttacggaactttacgaatcacgtaacgatacttgtttcatttctgtaatgtcacgaaaccttacagattacgtaatcatcccttttttggcttccgaaatgttacggaacttcacggagtgtgcaacaatgcttgcttttgacttctgacatgtcacaacttcacggattgtgcaacaatgctttcttttgacttccggcatgtcacggaacttcac

SEQ ID NO: 36080 - DNA, 397 bp, Glycine max
tgtcgcctagctcgcccaggcgagcaagggtgtctctctccatattcaacagacttctggaggaatcttctggagggcccaagtgggccttgttgctatttgcacccccctttttactaaatgcacccccttctatatttttttttgtaattctttttccataacgttacaaaactttacgaatttcgtaacaatacttattttccttccgcaagattacgaatccttacggattatgtatttactcttttttagctttcaaaggagttacggaaactcacggattgcgcaaaaacacctcttttcgatttccgccacattacggaatttcacggatcgcgcaagcctgcttcctttagatttctgagacgtctcgggacttcatttattgtgcaac

SEQ ID NO: 36081 - DNA, 443 bp, Glycine max
  unsure at all n locations
gacgactnctataatcgagaaaacggacgactttctgagtttatttcggcactatgagcagatgacagtgtagcagagtccgtgagatgacgttttatagagtgatcactgactttcgaatgaactaccactgaatgtatcactctacagatgaggatatgttagagcaagagcctgctttgatctctaaagggcaccaccgattgagttgttgaaatatactatcatgcccacatctattataacgccgatgtactccgagacataggggagatgtgctaacaacggacacgaacgttgagataactccctgatgtggagacttctccaagaacgcgccacttgtgaatatctggcattataacttttataatccatggcggagactccatgctgactcctctcttggagtacgcacgcgctaggcactcgtgtgtcacgca

SEQ ID NO: 36082 - DNA, 427 bp, Glycine max
  unsure at all n locations
caccatcacatgggggtagattggtgactctttactgtcttttcctccttttttgagagcctcaaacatttctgcaccaacgtcctccaagaagaatttcggcagaacggaccttccaactctgaagctcgaagctttgatcccaaagaagcatgccatgaccattatcttcaagcccatctcttttcccagcacacaaacaaaagggtatagaagaaccaaaactatggctcttataagcccccctgcctcaaaggccacgagcatgaaatatgggaacaaagaagaggatttcaacaacgcgttttcgacatcaaagatcaacgtgtgatcgttgaggtctgatcggtggattagagaggggaatttcanggtattgttaaactgtgttgttgcacccgaaaaagaatggctaatggttctgtgg

SEQ ID NO: 36083 - DNA, 282 bp, Glycine max
  unsure at all n locations
aaatgacatccaaatacggaaagttttacattttttttattggtntctaaagagacaagacgttcatggtcttgatatgatcatcagttctggcagatgactggatgaaccaaattnttttaattagaaataatagtcatcaactcagcatttgctttgaatgattaagaaatcatgccacatgtagttattataccctaagtgttgacatcaatatctacttttgacttaccggctaggcattgcataaagccaattcacttaacctacacggattttgtt

SEQ ID NO: 36084 - DNA, 419 bp, Glycine max
taatgaccctcaatctttcaatgattatagatccatctcccttattggtgtgtctataaaatcgtggctaaagttctggccaagaggctggcccttgtgttacctcatcttatagatgaaagacaaacggattttatgaaggggaggcacattcttcatggtgttttgattgccaatgaggttatagctgaggctaaggctagaaataaaccttgcatggtcttcaaagaggattttgaaaaggcgtatgattcggtttcttgtggttttcttgactacatgttgatgaggatgggcttttgtgaaagatggaggaaatggattaatggtttcctgtccactgcaaccatatccattttaattaatggaagtctgtttttggagatgccactcaacataatgttagaaccttaaaatgt

SEQ ID NO: 36085 - DNA, 444 bp, Glycine max
ctcaagcttgaagcaacatgctcgcccaggcgagctgtttgctttctccttaagattcctgatgggcgccagataggcccagggctgaagaacactccccaaattgatcagttcacccctattttgagttttttttggcttatttccttccaaaacattgcgaaaccttacagatcgcacgacaattggctttaagcagctcaatgttaccggaaaaaatctgcatgtcgacaaataattatacccggatgaagttagggtatgacagttgtgtaacaccctgatatatatctatatattattagtaattatgtttgatgtttgattatatttgttgcgttatttttatccataattattttcaaggaggttaatttagttaataaaggggtgtgggtagataaggatctagcttctcaaagaagcctcttgagaaaacttctc

SEQ ID NO: 36086 - DNA, 394 bp, Glycine max
  unsure at all n locations
catcaaggatctaagatctttgttcatctaataaaatcatgtagcttcatcaaggtaaggagagtctctccaattcttaaaccctaatcttgngtgtcttggaagctaaccttcattgaatgttgttttgatgttcanaatttcatagctactgcatangctggaactgtatcatgtgttgtttctcttggtaatttaaggtaaaaaatgagttatttgggtgccaaaacttanggttaaccttatatttcacctaaatcatagttntctagtaaaagttatgaacaaaacaagtttaaggaatcacgaaaataaatcggagttttctagtaaaagctatgaacaaatcangagtttttatggatgtatggaccatntttcatanatatttgac

SEQ ID NO: 36087 - DNA, 284 bp, Glycine max
  unsure at all n locations
gatannncgggactctccgaacctttcttgcaatcccnangangatncgtttgagttctatgtgtcggcacacggcgtacctgncaacaacancccccaacggcccngagacccccactacttaactatatctctgaaacccatctgcttaattcaagtgtggatctgctaacgtaaagccaatcaacctatatagcactacttgctcagttgatcactaacagaactctaatcaagtcctccttgcagggaggcaatgaatgtggcacccgcgacttaaagcg

SEQ ID NO: 36088 - DNA, 406 bp, Glycine max
  unsure at all n locations
catggggtacccatcacatatggtactaggtggctgtctgactatggtgcacaacaagttntccacatccacaaatcacgcataaagccaccatcccctgttgcccacctccaactgagctcacgtactcccacgtagcccatatcctcgtttctctcaacaccgggtccncatcaatcctcccaagcttccccaacatccaggtaattcaaaatccaaatcatcacaaactaacaaaccaagcaaaatagggcataggcagaaaactctgcccaaaactcataccaaaatcacagctttttctcacttatagaccccagtaacatttcctccgttccaattcgttaaccgttggatcaactcgaacattttactggaagtctctagtacataagtctacattttg

SEQ ID NO: 36089 - DNA, 313 bp, Glycine max
  unsure at all n locations
tttatagaagaccttttcacactaaatatacatatcttttataattagtatccaaagatgtataatagtgattcttacatgataaggtgtgataaatacctctagaagtgaatcttgtggtttgcacttgacgatagttattagatattctgtgataaatcatatcttatactttgcagatatacgagactctcttcanaggaattaattcagaatttagattcctagtgttgttgcatggcgaaataatatattatttctatttctaagttttcccacaattactctctttattttaaatatatatagagaa

SEQ ID NO: 36090 - DNA, 304 bp, Glycine max
catctgcaaagttggcataggagcattactaacttcaataccaaattatgaaatttttttcttctgttttttcttttgtaatatatttcattcaaagtaagtaccgtaagtttgtaaatattgcatttggttgttctaaacattttgtatggccatacttttctgggagattctgtgtacttcgttacgcatgtgttttttattgtacatagcgcgattattctctgtacatatggattaagccttggcatgtttggggcatataattcaggacatcctttctggatccatataagaaactata

SEQ ID NO: 36091 - DNA, 357 bp, Glycine max
  unsure at all n locations
atgattatggatggctcacaaacaagagttctatgncctcnatgacgncnnancatgcgtggtaatagtggaatcttaacaagagagaaccacatatggatttanattctctagagagtatatttgtgagagattaagaattcatagagaattcttctttgtagttntgtattcttttctcattaatagagattcttctttagcatacactctctacgtcaaatacaatttgtcacaacaagaatggtggttgtgccatataatacttatgcttcgtagtggattttcttacttaaggaacatgtgaaagtgcagtcatgacattctcgttgtgacttgaatttgagaacaaagatg

SEQ ID NO: 36092 - DNA, 205 bp, Glycine max
  unsure at all n locations
agggggacccatcccntgaaccccnnatagagtacactttttccccgcgggtgaagtccctacagctaggactttctacaaaacacaggcagcgtttccgcagagggagctaaaaaatgcatgtgaagaacgaagccacatacaagggagcagagaacctcatcacacgcaaagccgaccaattaatcaaagccaaggaattctc

SEQ ID NO: 36093 - DNA, 419 bp, Glycine max
  unsure at all n locations
tntcgaggaagtnntctcaggaaagctgctcggtgttgctactctantctataaatagaaacatgtgaaacacttgtggtaactatgacgaatganagtcttgtgagacacatctcagagttcaacttctctccctttttctctccttcaatttcgtgcccccctctctctttctctacctctatcttttcctccatagaagcatcctctccaagcttcttatccaaggctcatcttggtggtgaagctccttgtctcatggcttataccttaacggatggcacctcctctcacctctttttctttgtcttccgctgcatctccatggtggaaaatcaccattaaaggaccccattgaagctcaaagatccatcctgcatagaagccccacacgctagctttcatcacatactgtggat

SEQ ID NO: 36094 - DNA, 331 bp, Glycine max
ttctgttataaaggttgatgaaagaggattgatgtggttctacactggtgacatatggagattccataaagatggttgccttgagatcattgatcggaaaaaggacatagttcaactcacacatggagaatatgtgtccttgggaacagtatcaatgtcggcttgtggaacgcacttcctttaatatttaataataatattatttaatacaggttgaggccgctgtttcttgcttccctttgtagacaatatcattgtgcatgctgatccttttcatagctactgtgtggcactccttgtatcttctcattctgcttcggagcattgtgct

SEQ ID NO: 36095 - DNA, 362 bp, Glycine max
  unsure at all n locations
ggcaatagcaccccacctgacgttcttaagtcctccntttcttcgcgacanaacaacaggnaccactctgtggtcatcagtataagcaggaagtttcacccttcaacacttcctcatctcaagcttgtagaattatggggtacccatcacatgtggtactaggtggcggtcgggcgatggtctcaacaagttttccacatacactatgcgcgcataaacccaccatgccctgttgcccaccttcaactgagctcacgtactcgcacgtagcccatatcctctttactctcaacaccgggtgcccattaattctcccaagcttcctcaacatccaagtcaaacaacattctcacagtccaagc

SEQ ID NO: 36096 - DNA, 264 bp, Glycine max
  unsure at all n locations
ctaacacttcagttgcggccacattgacgtccctcagcttgtaacactctnttataaccctaatggatagggtcttgaacttatccttgaccacttgtgctctttcaagtttcgccttcaaggcttgcacactatttgctctcctcgggggtttcaacctctttcaaacttgaaatctttagcttcgggaggcaaagtatctctagcattctagccatcagccacttgtgatagccgtcgacgatcccattgacgatctcccta

SEQ ID NO: 36097 - DNA, 363 bp, Glycine max
acatgtggtacgatcgtgtaattaatgaaatcgctacaaaatgtaagtgttgctatcaagactttgcttcataatgagccgaacagagctaagctgcacctggtagagaactttctgagtaaggtttgaatctaccttataatagtttagttcatctatttggcagttgcacattaataattaatggattatataaagcccataaagttgcacattgataattaacggattatataaagcccataacttctctgatagttacctaagtacgtctctcttgtcaaaagtctgctctacctctagaaattatcttttactatcatggtattgatatggccacaaactacgactatcatatctaaa

SEQ ID NO: 36098 - DNA, 518 bp, Glycine max
  unsure at all n locations
cggagtgggaannagagggtgangcttgactgcatatctcgtcannacgcgnaananangatactnaagccgagctntcactgcgacanacccagcgctcttacatacttancttctattaaaaanaaanagagagcgtgacatggggatatgagcatnncattggtccttgtttgtctcatttcgcactttggctttatgcctcgtgtgatggcagaaaagaataacatgggacaaaattgttgatgtggtgaccggttgagaaagtaacccgtggaattgctgctttggacaattttgtctggttcgtgttaaacaaggaaaccatgaatgaatgaatgaaattacacttacatttgctagactttgtctttgtggtacctttattacgtgtcaccaccccaacccatcacattctcacaccaccatctctccttggcgcttttttatatattacggtggtccaaattcaatatcattgcccatacatgcaaaccaaatattaataagttatattn

SEQ ID NO: 36099 - DNA, 254 bp, Glycine max
  unsure at all n locations
tgcaagtgcgcttcaaaagcgataggaaaaagatattcccgatcaaagatcggaagaaagaaaagaaaatcccccatccaagattggaagaaaacaaaagaaatatacagaaaggtctttggaccagacaatatctgaataacatgcagaattgtcacaaacaagaaaaggaaagaaaggaaactanggctcgcgacacatgaagtggtccccttttttattaccaaccaaaatcctttgtgtcggcaactctt

SEQ ID NO: 36100 - DNA, 387 bp, Glycine max
  unsure at all n locations
agctacctagtctatagagaagccgcggactcttgttgtatctnngaagaacgaaagtcttatgagatacacttcatagttccacttcttttcttcttttattccttcaatttcgtgctcccgccttctctctatcttttcctccattaaagcatcctcttcaagcttcttatccaagggaattcttggtggtgaagctccttcttccttggcttattgcctagtggatggtgcctcccctatcctcttctactttgccttccgctgcatctccatggtgaaaaatcaccattgaaggacctcattgaagctcaaagatccagcctccgtagaagctccacaagcaagctctcatcaagtggtaatcacagcacaagagcttcaagg

SEQ ID NO: 36101 - DNA, 406 bp, Glycine max
  unsure at all n locations
tgagggaaaagatctgatactgttgaccgcanttngacaaatcnncaagnnncngnngncaaccgggaaaagaatgttctttctcttttccnncncctnggcaaaagtatgcgccaggactacccccctaattcttttgggctcacttttcctttcccaaaaacaaggctacccgctgaattctttggggctccctctccctggcaaagattcaaacgacacagccgagaattctttgatctttctttccctatcaaagattcaaggactatcaccgagaatcttttgatccttcacaagttcaaggacactgccgaaacttgcttaccatggaggacatcttgggtcagagagggcattctgggtgtggatgaacaaaaggacactctggacttgtgtaagatag

SEQ ID NO: 36102 - DNA, 386 bp, Glycine max
  unsure at all n locations
aaaacggttgcgctgagctgacctgaaatcaacttgcngcgattggcttcctgccaatgatcaaggggtcttnataattatacnganaacacgcgtgataattcaaaaaaaaattggcagtgagaggtgaaatgaggaaaaccatccgtgatgcattctatcttcaatttccaccacccacatgctttctcagccatacaacttctcttaccacaccattatcacaaggcctcctaatcacccaagctgttaccgcctttcatgcgacacacctttgccaacaaacccacccgaaatgatttgcgtgaaaaaacctgtaaatacctgctagttcttacccattttcgagatcatcaaccatgggctttttggaacccggcttcatg

SEQ ID NO: 36103 - DNA, 504 bp, Glycine max
  unsure at all n locations
agaaaggtnnnaagaggctgatgcttgatagcttgntnatcnanccnttgccnactgggcatctatacgctnncagagacttggatgctcctaagcaattatctctccacagagaaggagctattagcgatagtttttgctcttgagacatttcgttcatatttacttggtacttgtgttattgtttatattgaccatgcagctctgaagtacctgttgaagaaggctgaatcaaagcctatattgatcagatggatgctgtggctccaagagtttgatttggatatctgtgatcgaagtggtgcacataacctcgtggctgaccacctgagtaggattgagcatgcgtttgaggactcacccattcgggatgtttttttgaatgaccatttgtacattttgtatattatttctaattccttccccactccttggtttgctaatattgtgaattacttgggtggttctattttgccttccttaatatctaaagctcaaatgatt

SEQ ID NO: 36104 - DNA, 508 bp, Glycine max
  unsure at all n locations
ggggnaaagggtggatgatcttgtacacgacanacaaaaaaaagccgggggacaaaccnaggaatagagagaggggagaggctccngtngttacatnngaaagagaaagaggggggagaggggcgacaaagatccaccactcaacacccgaaagacccccggaagaccgcacacagccggccacaggggacaacacgagcagagcatgacaacaacaagctctccaagaccaaggggaaacactgcgcgtggggcagaagcacagcaagacacggcgtatgacctgagggagggcgccaaacacagacagagagacagagaaacacgcggcacctccaaggagacaaaacaacaccagaggacgctcatagcacggaaaagacccctgcaacagtatgagccacaagcgacagccaccacaaggaggtgcaacgaccacaacaacaaaaagaaggggacccctagacaacgcagaataacattacttaccccaaagatcagacgaagg

SEQ ID NO: 36105 - DNA, 389 bp, Glycine max
  unsure at all n locations
ntatgatgttcaacagagactatgttgacataattgaagattgttcttgttgctcctaatgcctgatcgttatgaattgtaatctcacattagagtcttctatctttgtagtataattatgactcatctttttgacgcacaaattaaatntaaatatgtatctgacatagttgccattaatcgtattttaagtaagttatctatctttgtacgtttctttaatgtagtggcacgatgaccaagttatctatctttaattagtgttacttagtttataattaattattacttaacgcacataggccaaatctaattctatatattaattttaggtcaagatcaatcttattttaagtaacttaactatctttctatgtgtctaatgtgga

SEQ ID NO: 36106 - DNA, 511 bp, Glycine max
  unsure at all n locations
ngggaggcggantagaggctgatgcttgttanacttgcannattgagnanaatagcnnagcggagcnggactaaagccgcgacacgaagcagaaaggacttcgttnattcttcaaagcagcacacncacgggagaatttgtggagccctgagtaaacgactcttaaactgagccaaagattgatctctaagcaccaggtgtgcttgtacagagactgcgttatcattaataggtgcacaccgaagcaattatggcgggtaccttccattgacagctctaaagggagacataccagtgctactatggcaagcaaagctataccaatactcatcccagtgtcatagctcgacacattccttggggtttgccaaagcgaaccctctgagactcatttccagcgtatgttgagtgcctccaattgaccatctgcgtgtgggtggccagctgttgactcgggcacagagtaccacctatgttcgcattagttgcgaaacgcaccggaaacacctcg

SEQ ID NO: 36107 - DNA, 236 bp, Glycine max
aggtgacgtgcgtgcacataatgccgcaaacaggagaagtgtggtttccaagccggaagatgaacacgggccggaagccaaaacgcaaaggcaagacggccagacaccgcgagcactacgcaaccgacccgctaaggcagagggcctgggcccgccaagcacatacgcccagaagcaccggacccggacccggaaccccagtccattgcagggcagaggggggagaagcaggccac

SEQ ID NO: 36108 - DNA, 506 bp, Glycine max
  unsure at all n locations
aggaagggcgggtgcggcctggacccttngatcgattgcatngtcacanccnnaagcnngcctanactgatgaaggatgattctgcgcactctgcagcgctttactgangtcgtcttaagagaagcanggggagccaanaggagggggtaggagaaagtggcggaagcactactcagaacatggaacagcactgctctngtgagagaatcacactcaccagagatganataggcgcctcaggggaacgccacaccccaacacagagcacgcgatagaccagtgcaattacgttcgaaggcagcccacctaatactcgggagaaccacggccaagggaacccgccccgccgccacaaaaaggcgtcaaaacccccagaccactaagaatcggggcacaaccggcgaaagaacggacaccgggagaagaaccacgcctcgtcacaacagcggggggataagacaagcccactggaacgccgtaggggcttccctaccagagacgggcc

SEQ ID NO: 36109 - DNA, 108 bp, Glycine max
gatactgtgcgcgctatgcgatgagagtgtagccctattatcccatagttttatgtcaacccggatgggaatgagagatcccgaagatataacgcacgggtgctcttc

SEQ ID NO: 36110 - DNA, 398 bp, Glycine max
  unsure at all n locations
ngcttngtgggcttctatggaggctggttctttgatcttcttttgtgtcctttaatggtgaatttccaccatggagatgcagcggaagacaaaggagaagaggtgagaggaggcgccatccactatggaataagccatggaagaatgagcttcaccaccaagtgagccttaaataataagcttggaaggatgcttcaatggaggaaaagaaagagggagagaaagagagagggggggagcacgatattgaatgataaaagagggagagaagtggaactttgaagtatgtctcacaagactctcattcatcaaagttacaacaagtgttacacatgcttctatatatagactangtagcttccttgatagctttcttgagaataacttcttgagaagct

SEQ ID NO: 36111 - DNA, 337 bp, Glycine max
  unsure at all n locations
atgttctatgcttcttgaggtgtcagnccatgatttatctccttggaaaagacatctttaaattcctgcaataagggttgacactagagaacataatagtaactgatagaatatcactctctctcttttgtgtatcactcttttcctcgggtgtatcactcttctttttcatattcctttgtggagcctcactattttctttcgcttgttctctctnttctctcattctgatttggtcatcacacacttctctaggggatagaggtttaagataaacgaggaagatttgactattcgtctgtagggctcttctttgttacgattcaacaaacgttgc

SEQ ID NO: 36112 - DNA, 494 bp, Glycine max
  unsure at all n locations
aagaacgannaaggagtttagtctgtantcttgcannaccanaaaaagccnnaagnccagagaagccactgagaggnagcaaccgcatttacnccttttatgacnanggcancannncnggcgctggacngcngagaagangaaacccncnnncncaanaaaanncnagccccaacaagagacangncncccaaggccccaccacnggccacaacnatcaaacgncnccccaaaaaaccgagnccttcaaaaaaaaanggaagaagaaccgccccgaaaccgagggcgagggcaaccggcgcaaagnnnnnaaaacgccccaagactcanacggcnctctcactgagtngctaatacctgagatatccatcctgatggctgtggtcctgnaagcaggcaaaaatttntctaagaatactctctttaggtcatcccacctcgtgatggacctttgaacaaggatataccaccagttctttggcacatcctctaag

SEQ ID NO: 36113 - DNA, 481 bp, Glycine max
  unsure at all n locations
ggaggatgatccctgaatgactngaacnaccnaaacnnaagcnngataggagaaagggncctanaggcacgcgcangcaacgacttcccatgtttacttatggcaagcagnagggaanngaagagtgggagaaaggcgacacaaacaggagccaagaacgggcaccaaaatcaattggcaaaaacaagcaggcaccccaacctaaagccgacttacatacctctaaataagatctgctcgacatgtccaccacacactagcacctgcatttgccacacatgttaatggtggaaaggtgaggtgagtcatcacaaaacctcacgtgctctataaaaggcaaggggacaagaacaatgaacctgctgtcataagcaagtgcaacagacaagacacatcacccacagtgatggtcaactctctcggagataaggggaagatagaagcctacgcccgccccactcagaaaagcctcccccacccn

SEQ ID NO: 36114 - DNA, 334 bp, Glycine max
  unsure at all n locations
aaaaaaaaagagatgagctgantctgacacaaaactagcnngacgcgcacatngaacgtcagccggaactttatacttgctaccaccatagccggagaacttgtcataacatgacacttcactggatttcaacctcggatttatttggttgaacaattacaacacaggcaggtgacacccgagccgcacatgcttaactaacacatcgccaatgtgtttgcaccccaagctggggatgcgagggtcgccccacaatcatttgatcagtggcccataagacaggtgcgccaactttacatataatcaatttctagaaatctgagacgcactgaca

SEQ ID NO: 36115 - DNA, 515 bp, Glycine max
  unsure at all n locations
ggaggggggggggaacgtacctcgttagctgaactgcaaacnaagcagcctaacggagatgangantnggcgcgcgangcagggggttccaanagtgctgctcaaagaaaaggcagganggggcganacaggagcggganacagaagaagacacgcacnccccacgaccaccngagaaaaggaaacaacgaagggccccaggagagaagagcacagancaccngagacaagnacgccaagcacccncaggggggncggcaaaaaccancanaagaaaccacaccgcgacacaacaggaagccgacgccgccaacgcgccagccaaaagaggaanaccgacgagcaagggagacaccccggcngaccacacagaagggaaacaaaacccacacggcccagagaaagaggacacaagcggagcacaagcgcccgggaaaaaacagcgcccnaggaagacgcngggggagaaacacaccgccagnaaacaccaccggaaaaccaagagaaggagggcg

SEQ ID NO: 36116 - DNA, 353 bp, Glycine max
  unsure at all n locations
nagaagcgaacatgatacgaaaccaaaaagncnnagccagagagcaagacgggaaaagaggtcaacctcaganaggaacaaagggacgggagccaaaacccacacacccacaaaggnaagcaagagacaacacaccaagggccccacaaacacaacaggaggggaaagaacagacaagggaaaagagagagacaggccgaaggaagcaacaaaaccgagggagacaacaacaaaccaagagcgaaggaagagagaaaaacaagacacaacggagcgcagggagaaccaaaaacacccaaaaaccgcagggaaaaaaggagggccaaggcaggaaaccccgccaacaaccccaa

SEQ ID NO: 36117 - DNA, 441 bp, Glycine max
  unsure at all n locations
taggcacaagtgagaggagagggttagtgtgtgttatagagttatattttgcatganagacaagtttcgtaaggcacgtgtctattatgatggttntcanaagcccgtctttgtagtcactctccaatgatgatnntttgaataactgtccttaaactcacaattccatgacagttatttgaaaatcgtcttcgttgtcaattcatctaattacaagattgtctccatgttatctataatgatgatgtctgataaccatcgttgatggcgtgtcgtaaaaaatattntntggagtagtcttttactttntccaatctccattntttcttataatttttactatttcaatccctacttcttattattatcgaaattactaccanagttattatcaaaatttccattagaattgttattaaactactattaaaattatcatta

SEQ ID NO: 36118 - DNA, 413 bp, Glycine max
  unsure at all n locations
nctcatccaaggctcatcttggtggagaagctctttcttcctggtntnanccnnnaaggatggcgcctccgctcacctcttttcctttatcttccgctgcatctccatggtggaaaatcaccattaaaggaccccattgaagctcaaagatccagcctccatagaagccccacaagcaagcttccatcaagtggtaatcagagcacaagagcttcaagtaggtgctccttatacctccattaattntttgctttaccttctcttccattgctgtttcttcatttctctccatgtatctcctcacatgtcttgtgataaatgtttttaacatgattctttagagtttccaccgattaaacttgctatagaagctagatttgatnttctatggttcacatttcttgttcttggtc

SEQ ID NO: 36119 - DNA, 506 bp, Glycine max
  unsure at all n locations
aganaagaaaaagagcgcgaatctgtagtacttgtagacacnacntatananacacagcccaccccnggngnagcgaacgagagaagttattatnacctcaatgnncccngnagnaagcaacaangagccatcagcgaacgggaccatgaccacggaggaagccnnancaagacaacaaacacaanganggcatgtaaaaagacacagcagacaagggggacnacangacnaaagaagaaagaccaaccagagacaccaacacacncaacgctctctattaaaaaaacaaacaccggccataaaaaaataatggcgagcaatcacgagcggatgtaggatgcaaacttgtggccaatgagggagcagcgaatcaggcatcacttacccattgaggggcacgtacacaggatgggaatactcccctttggctcacacatttagttattcgagaaaaaaggattgcatgatgcataaggctggaacggccaaaccatacgcacaaccg

SEQ ID NO: 36120 - DNA, 434 bp, Glycine max
  unsure at all n locations
cttataattntcatatgataataaacttctacaaaaatgtacctagatccataatattccacaatgcaaagaatttaagaataaaacttcctaaattctttaataaagattctcacacacacattatatacacatacacatagagtatgattattatgtgaatgacaatcttatatgagaatgagaatagttaatttcaatcattggattgaaatgaaagatttagattaaaaatattttaaattcaaattanaacctcatgtaatcataaaatctctaagaaattaatcaaatatctaatttatcacgtccaaatatatcttanacctatcatcaccattatgatcatcagtccaccaccatcgccatgaccgttgtatgtcaccaccaacatgattgcgacagtggcagcaacaacgattatagtcattgtg

SEQ ID NO: 36121 - DNA, 506 bp, Glycine max
  unsure at all n locations
gggggggaggaaggagatgaggcttcgantctgttgatcagacanatcctagaaangtagcnngagacaataggcggggagaggttcctgccttctttttgaacgngcacaggaggatttgcagggggaaccaagcatatcatccccttcactaatattatgaagctttgtgaatcatatgttacattaacatgcatttaaattgataaatatgatgaagaataatggaacgaatgcgaaacgcatataagacaaataatattgctctggtgataagaacacgtgaaatcgatgatttttagcaatttctaacatgttgtgcgtagaaaacatatgcttgcatacgatagcaacccttatgaatatacagggcatacaatggacggtaacacaaactctttgcatagtcgatgagtcgccagaacactatggtaacatacttgtggcattaacgctttacagatgcaaaggactctcgcacccgaaaacgaaaggtcgcaaaaatg

SEQ ID NO: 36122 - DNA, 472 bp, Glycine max
  unsure at all n locations
cgantnnggtggtgagctgtgctcgattatcnactagctccgatcgactgagactgataccgcctcctatgcanatattcatctgaaggctcctgaccgatcactgcagatatgttcaaaaaagagggggaaaccttaaaaaatattcccaccgatggaggaattggccggcccaagtagctcctcccttggttgagaaagagatgatcacgatgatggtagacactctgccagtgttctactatgagaagctagtgggttacatgccgtccagctttgcggatctggtgttngccgcggatagaactctcagccttattgcccctccgaagctttatgtcatattcgccaataattgacattcgcccttcaccctgccacatcccgttaacataatgtccatttaattcatctttactctcatctatccctaatccgcctcccatcacatgtttccctctctttaccctcc

SEQ ID NO: 36123 - DNA, 511 bp, Glycine max
  unsure at all n locations
cggaaanaagcggggaaagcgctgaaccatgtatatctnngcnanatcgagtacactagccngccagaccgtgatctggtttgcggatccaatagatactggtatatatgtgttatanncatactanacaccttcatctctcgtactctcacattggtaaataaagcctctagtaatctacccgatgcttcttcacatggatgaaaatctaaaagttcccacagaacatctattacctccgctttcatcatctgctcagcacttgagcatcgcttctgtcatgaactataaaagcattagggctatgctaatngtactctcaagtgttgagtgcaaaaagttcacaagaaccactacaggaactntaaaatagttatcggcattgggaatgtaatacattagagagaactaaagcagctgattccagagcgcatgtggtggctgaggctcatcttgataataacctttgcagctcaaaaatacctccccatcaccactggcttttggcacn

SEQ ID NO: 36124 - DNA, 519 bp, Glycine max
  unsure at all n locations
ggggngnnnnggtaggcatgacatcgtacacngacacttcgatacatatcctanaagtgttcatataaagatctttcaacgttgatgttctttccagagtgagtacaggaacattattttgatttcaaccccatatagtaaataataatggccttctggcccttggtcaagtttcaatatttaaatggattttaattggttcccttaaagaacttcctttcctctggtttcattgggattggttcaagtataagaattttcttggaacaccctaataattaccaactaaataacaattctaattgatagggcacactttgaaagttgatgaatttgaaccaanatacaaaagcaggcccctatgaggaaagaggggtgctcaaatattactaccaatactaatgaaaaaacatgtcagacaatggatgggacagaataatagtaccaatgattgcanatagaagagatgacaggccagatcagacagtgcaagcatgccatgnacagagaggaacacan

SEQ ID NO: 36125 - DNA, 516 bp, Glycine max
  unsure at all n locations
ggggaaaaaaannnaaggctgaacatcgatacttcgaacttcnaaactcaagctgatgtgcgctaagccttacatctcaggctaagngcatnttgtataanaatttttgngnngcanaaagcgctaagcgcagccttgcggcgctaaccccaaaaccctctcttgaatttgaaaattcaaagtgggccgtacgccgagggtaggctaacccattggccttaaacctcaaatgtcataatggcaccgcttaaccgcgcccaaacggaaatgctaaaaataaaatagaactgccatangtagttacctttacaccaaaagctttttcctgtgcttgtgcccttgtgcttttgtgctttcttctgcctgcatttcaagtcattcgtgcatcatgctngctntcatcttacatncttcacttcaatccaagtaagtngatgtttattttcattngcttttcatgcttttgaccttangatagatgatttcctcctttgtagctngcagtgcttgttaagt

SEQ ID NO: 36126 - DNA, 298 bp, Glycine max
tacagatacgctggaagcactatgaaacacatgatgatggatatgtgtatgacagaatgagagcactattgggaataatatccttattagtataacattctgcacactaactgtctaggagttgaagcattataactatattaagacatggaacaataaatgtagtgactaaccactgaaaatgcttacatgcctaagtgcttgaacgtatgtgtctagactttctcagcactaaggtaatcttgagtaaagattggagagaaaaagttcatgaaaagtcaacacattttgatcgttt

SEQ ID NO: 36127 - DNA, 424 bp, Glycine max
  unsure at all n locations
nntaaaacttgcattctaccctctgatcccttatttacttattgctttctctaattatggttacagaaggaccggctactttcaacccctcttgaacaataaggtttaaaatgtgagcacaacattggatatgaaaaaattcaccaccacttactaaaccattagcatgcaaaaaaagtctttccttcaaatagtcttgcattttatcattggaagaagcattatctagagttaatgaaaatactttctgctcaatcccccattcttccaaaaaaccatatataactttagccttctcacgccccgagtgtggaggaggaaaatgagaaaaattaagcattttactattcaacttccaatttgcatcaacataatgtgcagttaatgaaatataaccctcagaagtacaagatgtccacacatc

SEQ ID NO: 36128 - DNA, 339 bp, Glycine max
  unsure at all n locations
cagtagatgaagatgaatctgtggctcacctcatgtactctctctaaggacaatagcatcatttcttgcactgaattgttgggagttcgaaaccatcttttcaatcaaattcctagcctaagcaggagtcatatcaccaagagctccaccactggcagcatcaatcacactcctctccatgttgctaagtccctcatagaaatattgaagaaagagttgctcaaaaatctggtggtgaggacaacttgcacacaatntcttgaatctttctcagtactcatacaagctctctccactaagtttcctgatgcctgaaatgtcttttctgatggcattggt

SEQ ID NO: 36129 - DNA, 421 bp, Glycine max
  unsure at all n locations
tctacaacaagctagaaatataaaacgttatcttttctcatctttaacacttccccctcaagctggagcatataaattgtgtgctccaagtttggaacatataaagtggatctgaggacctctcaaggacttggtcangatgtctgcaagctggttgttggacttaataaattcagtactgatttctttggactgcagcttttccagaacaaaatggcaatcaatctctataggtttagttctctcatgaaatacagaattagaagcgatgtgaagagctgcctgattatcacaatacaacttcatctgctgaatatcacaaaattttaattcttgaagttgtttaatccacaccaattcacaagtaacaagagccatagctctatattctgcttctacacttgatcaggcaacaacacac

SEQ ID NO: 36130 - DNA, 265 bp, Glycine max
aaaaagagtgctatctctacgacctatctcacgactaatattaatcactcctcttttaagactacaaatatcgaatatggatcataaggctttttgtttacgactttggactaattaagaactaaagtattccaaacctttagggtaggacaatccaaaaaatggacgtaaattaactattacttctaggattccttttcttctgagtattatttttataatcttagaaaataattaatagatttattatcaggacaaattatag

SEQ ID NO: 36131 - DNA, 419 bp, Glycine max
  unsure at all n locations
ntagttgaacagaataatccanaaatgtctaagaattgtgtgttgaanaagcataacaagactttctgtgattggtttaaagatacaatctttgcagatgagaatgcttcagaaacattaagaaaactagccgatgggcctgtaagaaatgttataacttggcaaggatacgacataaacaagtattcattttacacaaaagcacaagatgacaaaagtacaatgcagaacagcggggtcaccctaagggctgaatctcaacactttgcaagtgtcaatgacgccaatccctgtgttgcttccgtcccttactttgggttcattgatgaaatttaggagcttaactatgtgaaatttacggtatgtgttttcaaatgtaaatgggttgacaacaacaccggtgtgcgcaccgatgatat

SEQ ID NO: 36132 - DNA, 441 bp, Glycine max
gactaagtgctcaccaacactagataagaatccctcattttgtttcatgtaaacctcttcttctagatcaccattcaggaacgccgttttcacatccatttgatgcagctcaagatcaaaatgagctactaatgccaaaattactcgaagagagtctttcttagatacaggggaaaaggtctctctgtaatcgattccttctctgtgagtgaatcctttagcaacaagtcttgccttatgtctctcaatgttgccttctgagtctttctttgttttgaagacccatctacatccgatggcttttacaccaacaggcaactcaactagatcccaaacttggttagatgccatagaatccatctcatccctcatagcattataccacacatttgattccttagaactcatggcttatgaaaacgtctcagtatcattttccgg

SEQ ID NO: 36133 - DNA, 397 bp, Glycine max
  unsure at all n locations
ttcttatccaaggctcatcttggtggtgaagcttcttcttccatggcttatttccctagtggatggtgcctcttctcacctcttctcctttgtcttccgctgcatctccatggtggaaaatcaccaataaaggacctcattgaagctcanagatccagcctccatagaagccccacaagcaagcttccatcaagtggtaatcagagcacaagagcttcaagtaggtgctccttaaacctccattaattttttttgctttaccttctcttccattgttgtttcttcatttttttctccacgtatctcctcatatgtcttgtgctaaattntgttaacatgattctttagagtttccaccgattaaacttgctatagaagttacatttgattntctatg

SEQ ID NO: 36134 - DNA, 499 bp, Glycine max
  unsure at all n locations
agggtgtgnnnncttgtatagccgncnactaggataaaccacggagcaacaagggtctcccgaagaccgactatctttttacacncaaagcgccagagagggcgttaacaacataaaacttattcctccaaagggaccgaataacatgtcataagcactaatcggccttcacatttgagaattcagagagcatatattctattgcttactaagatactcacatctcttacttacaatttgagacctgaacagttccatttcaccgtcagtaacatatgctgagcctataatatagcttgatgtgagatttctttggacatccacaacagcgtgttactagattacactatcgcacaactgattactagattgtgtccccctcagatgtggcttcatgctacagggcaagaaccaagatatgaaaatgggacactagaactttttcctcacaaggtgaatggtctttatcttcgtttacaacgctgtctgtatgatcccg

SEQ ID NO: 36135 - DNA, 544 bp, Glycine max
  unsure at all n locations
cccccccgccagccaataaaaaagaaaaaaaaggaaaagaanacccagaaacagggcggnnnatgagcctcgaagaccaccnanacannaacacccgggggaggaagaaaacgcccgaggagagagcaggangcttattgtgaccaggcgaccacaaacgtggagccggaagagactagtgggacaccccaaggcagagaaactgacaaacgaaaagaaaacaagcaacgaagagaagacgagactcaaagtgaaaccatgaaacctcaagcaaacgtagaaggagcacaaccaccaagaagacggacacacaatcaaacgagatctacatatgcagagaagcgcaaatcagcgccccaacaagaggagatgacaccgaaaggcaacaccccaagacgccgcgagaacgcgaacaacacacacaccggcacacacaaaaagaagaacgcgaggagagagactagcacagggggcaccacgacgcgacntagacacgcagagcgagtaaacaagcagagcgaaagacaggaccacaacacaaact

SEQ ID NO: 36136 - DNA, 270 bp, Glycine max
  unsure at all n locations
ctcacctccttgagatgagaagctagagnctagctacacaccccctataatagctaagctcacccctatgacaaaatacatgataatacaaaaaanatccctactacaaagactactcanaatgccttgaaatacaaggctaanaccctatactattagaatggccanaatacaaggcccaaacgaaggagaaacctattctgatatntgcaaagataagtgggctcatacttaacccatgggctcaaaatctaccctaaagctcatgag

SEQ ID NO: 36137 - DNA, 446 bp, Glycine max
  unsure at all n locations
ntntggattntcacaagtgttggctgaaaantttttagagtncttctacaaccaattggttggcaagctgaccaaggggggttaaatagtgtgttagatatatatgaaaatcatttcgcaaggagtatgtgttaagtcaaaagacatttgtgtcttaagacgaatcatgcccttgactattttgatttgacgcacataaatacaaaggttaaaatgttgttttgtgcgatattagaccatgcctcatacatttgtgtttgtataatcgaatgatagaagaggcattccatgatctgataaagcattaaatgatagcattaaaaaattcatttattgtcgcgtctcggattcattttatagatgttgggttagtcgagaatctaatagaggggaggggttgaatagattccttcgaaaacttaacctcttaatttcttaattcaatt

SEQ ID NO: 36138 - DNA, 331 bp, Glycine max
  unsure at all n locations
acctattgttgtcaacttttacttacttgcatntactggttttttttactatagaagtagtttatttctgttntaaccatccattatcaatgctattccaacaatgccttatttctgaattaaactctgtctaataagcaagttacctgagttcaatactcggatcactccattnntaatttaaatacttgactacccggtgcgctntccggcgaatcggatttcccttgaatatatttgtataaaggaaaatnggaccanaaagtaactggaggggatatccaacatatagtctntgaaaagtaaaggtggatgacattgatagtctcct

SEQ ID NO: 36139 - DNA, 441 bp, Glycine max
tcgtgggaaaccagtgcatggaggagaaagttggatgctgaatttgatttgtgggattcacaatcatgaattggcaaagaccttagttggacatccatatgctgggagattgacaaatgatgagaagaatatcattgctgaaatgacaaagtcgaatgtgaaaccaagaaacatcttgctaacgttgaaggagcacaacaccaatagttgcaccacaatcaaacaaatctacaatgcaagaagtgcatatcgttcttcaataagaggagatgacactgaaatgcaacacctaatgaggcttcttgaacgtgatcaatacattcattggtatagattgaaggatgaagttgtggtgtgtgatttgttttggtgtcacccagatgcagttaagttatgtaatgcgtgtcatcttgttttattgatagacagtacctacaaaac

SEQ ID NO: 36140 - DNA, 371 bp, Glycine max
  unsure at all n locations
tccaagtgctccgatcatccatttgcatactcatgttttggtggcatactccncgttgtttatttctttaggaatnntatcataactaagaaaacaccaagtcacccctataacactcgatccagaanaatggataatgaagagggcgtgtangaacatatgaaggccgatctattggccttaaaggatcaaatggcttccatctcngaggtcatgttanaactccagaaaaccatagaggataaagccaccgcaaccgccttcagtacagttagggaagcggagccggtgctgcagcccgctttgaatccggcctagacagaaacacggtcgtgttcggtcgaaggtatagtccacaagcttatccttat

SEQ ID NO: 36141 - DNA, 444 bp, Glycine max
  unsure at all n locations
ntcgcagataatgtcaatgccccaccgcatcccctgaatgtctcgtccgccccttggcctttctccatgtggggaatagatgtcatcggggccattgagcccaaggcctcgaatggtcatcgcttcatcctcgtagcaatagattatttcaccaagtgggtcgaggcggcttcatataccaatgtcacgaggaatgtggtggtcaggttcattaagaaagagatcatctgccgatatggtttgccaagaaagattatcacggacaacggcaccaacctgaataacaagatgatgggggaaatgtgcgaggagtttaaaatccagcatcacaattccacaccctaccggccaaagatgaatggagccgtggaagcagccaataagaatatcaaaaagattatccaaaagatgactgtgtcatacaaggattggcacgagatgctc

SEQ ID NO: 36142 - DNA, 291 bp, Glycine max
  unsure at all n locations
gtcactatatgtgacgccccacaatcggacatncgacttaaatgttatgaccatctgaatttctcaagagcttccgttgttcaattctgagcgtcttcgtatgtgatttgtctgaatcggacatgcgtgtgaaaaagtatgaccatttgtatttctcaagagcttccgattgacaatttcaagcctctcgacatattatgcgcccgaatcggacatccgtgtgaaaagttatgaccatttgtatttctcaagagcttccgatgttcaatttcgagcctctcgacatattat

SEQ ID NO: 36143 - DNA, 405 bp, Glycine max
tataatatattgatacgctcgaaattaaacgtcggaaactcttgagaaattcaaatggtcataacttttcacacggatgtccgattcgggcgcataatatgtcgagaggctcgaaattgaacaacggaagctcttgagaaattcaaatggtcataacttttcacacggatgtccgattcaggagcatcacatatagagacgctcgaaattcaaatggtcataacttttcacactgatgttcgatacaagcttataatatattgatacgctcgagattaaacattggaaactctctagaaattcaaatggccataacttttcacactgatgtccgatttaagcgcataatatgtcgagaggctcgagattgaataacagaagctcttgagaaattcaacatggcat

SEQ ID NO: 36144 - DNA, 238 bp, Glycine max
  unsure at all n locations
agttgtgtgttatacaacaataagccttattccaccaagtggagctaatatacatgtcaaaatcactaattggcatccacatttgagaatccaaagtgcataaagtttattgattactaagccactaacttactttacttacaatnttggcgatgatcgttctatatcaatctcgttaacctatgctctgctcattcttattnttccctgcatgatttccttgggactacagatactg

SEQ ID NO: 36145 - DNA, 468 bp, Glycine max
tcttggagtcttctatgcaatgcccttggggggtaggattactatattctctccccccttgaaaaggatttgatctcaaatccataggttcttgaaactcatggattctttcctcaacacctctaaaaagaataaaaacatatgtattagtgatgttgggtatgttagagtacgataaggactgaaaacccctttcttggccatcttcccatgagagaatatagttcctcaccaactcagtgagtggtgctacaagtatagaaaaatatgggataaacctttcgtaaaagtttgttaagatattgaagcccctaatttcccttatacatggcggagtaagctactcaagaatgacctttattctcttagggtccatgggaagcccttgatcactatttaaaaagttaaggaaagtaatggaataaaatataccttttttctttattttcatgttgattattcctacaa

SEQ ID NO: 36146 - DNA, 509 bp, Glycine max
  unsure at all n locations
aggggattgnnctggagantctagatctctagagagacaccngccgcatgaagctngcatccaagctcagcaagcggttattcttcttcttcatggcncacaccctagaggagggtgcctgctataacctcacctccttagactcacgctgcatctacatgtaggaaaatcaccattgaaggacctcatagaagctcagagatccaagctccataaaagccacacatgcaagctctcatcacacgaagctgaggagtccatcgatagccagtgaacacgacaaacttatgagataaaactcgcctatagcgtatcaaactctaccactntatggatacttcgtcagagatcactctttaatgccaagaatacgaagcaatactcaatactatcatgatgggtgataacaaggccatcccacagataacgtaactaagctcgcaagaaagtgggctatcccatctccgaatcaatatgccgctagcgagcagacctagcgccctctctgg

SEQ ID NO: 36147 - DNA, 458 bp, Glycine max
tgagatgaggaagtgtagaaaggtgaaacttcctgtttttattctttgaccacagagtggtacctggagatatgtcgcggagatcaagagaccttggggacgtcaagtggggtgctattgcccaaaaccaagcttgaccaatcccaacccaacccgggcatagccagtcagtgagaacctgtgatgtacctaagcatgcgagctcttggcagtcaacagataaaaggaacaaagaccacaaagcaaggaggcttgtgtggtggctggccagctgtgaactttgattgatatatgggatatggcctctggtaatcaattaccaagggtgggtaatcgattaccaggcttaaaaatgaagacaggaggctaagatggtctctggtaatcgatcaccaaggggtgtaatcgattaccacgcttcgaaactaagtcatgaagctaggagagcttctggtcat

SEQ ID NO: 36148 - DNA, 468 bp, Glycine max
  unsure at all n locations
agctgcagctgtaagccttactaatngcatttttatanaactntgaagccaaagaaaaagtattggtactcacaaaagcattattatatcctcagaagtctgaattgcttcgtatgatgcaagccaccaaatgcattagaaaaacaatggtttctaagatgatgttcccaagccagacatgtgcattgtataagtcccacaaccatctaaatcacattctctctactcaagtcttcaccatctcaacaaatgtctagtcaaaggtgatctcaagtagatacattangtatttacattccctttggttgaacatagcctcccaactaaggtaaatgtaacagatgacacatcttatagagtgatggttattatatccncaacaagaaagtggaaggaattagcgtacttcaaccnccaatcacctaaagtacagaacaccattatccacctacggtaacatgcttctag

SEQ ID NO: 36149 - DNA, 458 bp, Glycine max
  unsure at all n locations
ctttgatactntgaaacagaaactgacctctgctcccataatctttgctccaaattggacaatagattttgaaataatgtgtgatgcaagtgattatgcagtaggatcagttctgggtcaaaggaaaaataaaatttttcatgtcatacactatgaaagcaaggttttaaataaagctcaaataaattatgccacaactgagaaataattgcttgcaatagtatatgctttggaaaaatttagatcttatttgataggatctaaaattatggtttttactgatcatgttgctataagttatctgttagttaaagctgattctaaaccccaacttatccgatggattctgttgttgcaggaatttgacttaaagatcaaggataaaaagggaagtgaaaattatgtagttgatcatctgtctaggctgaccaatgatgaggtgatcacacaagaacctg

SEQ ID NO: 36150 - DNA, 424 bp, Glycine max
tggactcgatggggccgatgcatgttgaaagccttggacgaaagatgtatgcctatgttgttgtggatgatttctccagatatacctgagtcaattttatcagagagagatcacacacctttgaagtattcaaggagttgagtctaatactgcaaagagagagagatagtgtcatcatgagaatcacgagtgaccatggcagagagtttgaaaacagcaagtttactgaattctgcacgtctgaaggcatcactcatgagttctctgcagctcttacaccacaacaaaatggcatagttgaaaggaagaacaggactctgcatgaagctgctacggtcatgcttcatgctcaagaacttgcctataatctctgggctgaagccatgaacacagcatgctacatgcacaacagagtctcacttat

SEQ ID NO: 36151 - DNA, 277 bp, Glycine max
agatactcaccttacaaggaagtttcgtggaggaggagaattagagagtttcatttgtcttggaaatttgacggaaaaaagggagagaatttaacctttaaagttgtctctcaaaaatctcattcctcaaatttcccttatacttgatggagtgggccactcacgaatgacatttattctcttaagggccgcggaaacaccttgatcactatttacacaattgaggaaagtcatgtgataaaacatacctttttctatatttttatgttgattactc

SEQ ID NO: 36152 - DNA, 339 bp, Glycine max
  unsure at all n locations
aaaaggtaatattgtagccgatgctctttctcggcgtcatgcattactttctatgcttgaaacacaattgattggtcttgaatgtctgaaaagcatgtatgaaaatgatgaaactnttggagaaattttacaaattgtgaaaaattttcagaaaatggtttctttagacatgaacgctgtcttttcaaagaaaacaaatcgtgtgtgcctaaatgttctactagaaatctgcttgcttgtgaagcacatgaaggagggttaatggggcattttggggtccaaaagactctataaacattacaagaacattnttattggcctcatatgaaaaaggatgtg

SEQ ID NO: 36153 - DNA, 398 bp, Glycine max
atactcaaccttctagatgagttatgtctgcgaatcggacatcctgtgatatgttattaccatttgaatttctcgagtgcgtggcgttgtttaatttcaagcgtctcgatattttatgtcctcaaatcagacatcggagcgaaatgttatgaccattcgaagttgtcgagagcttccgtttttcaatttcgagcgtctacatgagttatgtcaccgaatcatgacatctgagtgaaatgttatgaccattccaatgggtcgagagcttccgctgttcaatctcgagcgtctagatgagctatgtacccgaatcggacatacgcgttaaaagctgtgaccatgctgatatggcgagagctggcgctgttcaatcacgagcgtctcgtattattatgtcc

SEQ ID NO: 36154 - DNA, 243 bp, Glycine max
  unsure at all n locations
tgttgatgcaagaggagcatcccattgcatantttagtgagaaatcgaatggggctgctcttanctattctacatatgataaggaattgtatgccttattaagagctttgcagacttggcagtataatctcttgcccaaggaatttagtattcacagtgatcataagtctttgaatacttgaaggacaaggaaagttgacaagtgcatgccnatatgtggaattcttgacaattccccatgtg

SEQ ID NO: 36155 - DNA, 425 bp, Glycine max
tggagaggatgttttaatggaggaaaagaaagagggagatatagagagagggggagcacgaaattgaaggatgaaaaatgggagagaagtggaactttgatttgtgtctcactagactctcattcatcaaagttacaacaagtgttacacatgcttctatttatagactaggtagcttccttgagaaaaattccttgagaagcttctttgagaaaacttccttgagaagctagagcttagctacacacacccctctcataattaagttcacctccttgagaagcttccttaagaagattcctaaagaagctagagcctagagacacatacctctctaatagctaagctcacctccttgagatgagaagctagagcttagctacacaccccctataatagctaagctcacccccaagacaaaatac

SEQ ID NO: 36156 - DNA, 449 bp, Glycine max
  unsure at all n locations
atgcttcacngantntgncacggccgtgctcttgcctgcgagcccctctaggttcttggtcctaggcctttgtgggagctgcattttcctatcgtaacccggcacactctttccagacgtctgtagcgaccaactctgatttttctttggccagtctcgcttttcctagtttttggtntcagagctcgaacttcttcatcttcttccagagcttcgaaattctcttcgttgataatctttaacttggcgagccaatctaaaccccgtgtacgaactttcatccattcatgataaccacccatgatngccatacgaatgcccctaagctctttatctttccttaacgggttttcccacgccttatggactctntgtataaccctgaaattctgcgcgcccaaatctctcacaaggaaaggagacangctttcttccgtcnggtgcttccn

SEQ ID NO: 36157 - DNA, 429 bp, Glycine max
  unsure at all n locations
ntaaccgtttatttaagccattttctcacgtaataaatgtcttaatgaatttcaaccaatcatttgtgttgtaatgtcatttaatcaatgttaaaacaaaatctaaccgatcgttcacgctataacctcggttaaacaaaaaaaggtaaaataataataaaataatcaaaaaaatcaatcggacgtttttctttgaaagtttccttgaattaattgactaataacccaagtgaaaccaaggctaaaatcaactcacaaatcaagcttgtccgcaaaaaatcactcaagaccgttttaaggtccaacgccttaaaacggtcctctttgcttatattggttaaaatggaccattcaaagcataaaatcaacatataaatttatcgcttttgcaagaactacgtaggtatgattntctcatcacaattgagg

SEQ ID NO: 36158 - DNA, 450 bp, Glycine max
  unsure at all n locations
gtagatagctncagcgttgcccaaccagctaacactgattntgacaggcacttgttcccgaacgccgaacattaataacacttccgggccatcaagggattggcattcctcagagagagtgggtcccactggaggaagatgaagtccttgactttcaagaaggaggtgcttattagcgcctggccacaatttgtgaaccccatgattaaatccgacctagagatagtcatgcaattctatgccaacgcctgcctaccgaaganggagctcgatatatgtgtgtagccgcanagatattttgatgttntgatgaatgccaaggatctcacgcctctcnaagtttattcaagacaagaatccaagaaattcaagatatatgatncagataatcttcagagtcttatgaaggaaattccaagtngaaacaacaagaggtttgaccatagaatn

SEQ ID NO: 36159 - DNA, 450 bp, Glycine max
  unsure at all n locations
tccgcaacatccaagtaaaacaacattcaaacagcacnaaacttcactgccaaganaatagagcaaaggcagaaaactctgccaaaacaccaaccgaaatcacagcttttctcacttaaagaccccagtaacaattccttcgatccaattcgttaaccgttgggttgactccaaaattttactggaagtctctagtacataagcctacattttgaccgttgggatctactagcaaacatccagaactcattctgcactgctctttccccaaccagcaaatgcatagcatttttctgcacttgtgcaaaattctgctgcacaatttcacagcaaaattctgcacaaagtgcagatttcgaaaaccacacttcccctcatccaatcttgcccaaatcaaatcctataagtcccaaaccatgtatcaatcatgtctaaaccaaagtcaagctt

SEQ ID NO: 36160 - DNA, 506 bp, Glycine max
  unsure at all n locations
aggggnttatgggcagttgcnngatgntctagagattctctagagaccacgcagccgtctggctctaganacccttgtgtatcgatatcattttttanagcccacaaaaggggtttttatatatgtttatagttataacccactaactacaggggatgattgcccttgtaaaaaaatagatagaacacacacacacacacacacatatagatataattctcaagcttatatatnaaacattcctcttatatgatgtgacgtatatatatatatatatatatatatatatatatatatatatatatgtatatatatatatatatataacggtgtgatgggcacgtggaaacaaaatatagagaaaatttgaaactgtgacttaagaagaattttgtagattttatttctcgacaaaaattttgtatgttttatatatccacaggaaggatgtcttattgtgtttcttcctcatataatgagtgttgaccccagaaaccatttatttn

SEQ ID NO: 36161 - DNA, 421 bp, Glycine max
  unsure at all n locations
tgcccgagtgatgcatccctatgagatgcngtggaattattttcgatcagaatggccattccttggaggatggggtagaaccaagcgcatgctttttcaaagaacgttcatggaatcaagttgaacaatggaagtaactatcttgcaaaaattggggcaaaggatgaatctagtcacatgactgcatgaacgactggcacacgtatttatgaaaggagatgtccttgctacttgcggtgtcacctataacatatatgtgatagaccgtgcggaaaatctaaattgattgaagcggatatgctgcacagatgctttaactgtacatcatacgtacacatccttgctgctcaataggagcggagcccatggcactctctccttgaatatgaacatgattatccataagatgactgtgtcatac

SEQ ID NO: 36162 - DNA, 411 bp, Glycine max
  unsure at all n locations
cagtctggatacccttcacgaacagatnngtcggctattggagttttatannttcaatccctctaatgaaaaatatgcatgaaatgtcggtaaaagaagatggttcgaatctgacgtccatgcgagtgatagcttcctttgttaaccctcgatcgagtcattctttccctgggccgaagtacgacaaggaattnntttttcgatcatactatcggtgaaanannatatttttngccgagatgggctaatgttctcctggccgaataaatgcaaatatgccagtttcggccgaaacaaaacgtcggttgagctcgctcaaataaacttagccgacctacattgtacatcttttatgcaacaccaaaacaagaggacttcctctgccgtaataaaacatatcggccagcgagc

SEQ ID NO: 36163 - DNA, 426 bp, Glycine max
  unsure at all n locations
ntacagcagantttagtaatgacccactaacctagaattaaataacttaatgccattaacctagggaattaaaacaaacttaatggctgagtgtaactgaaattgtggcaaccaaaagtcacccccaacagccaacaagtcagccaccatttggtctcccaaaaggctgatgcctatgttgccaattgggcccttattacaacttgaactaaagcccttttagttgattaacccaaaacatatttttggccagccaactttacaaggattgggccattatttagacaaactaaacactctaaaattgaaataaagtggtgtcatttagtcctcctccatttgggccatgatacaactcacaaccttggacttttctccttgaaacttgggcttgtattcaaatagtatggacaacacttgttgaag

SEQ ID NO: 36164 - DNA, 349 bp, Glycine max
  unsure at all n locations
attatatctcacacttttagaatattatttagacaatgataagatattattcttatcattttaacttagtaggttagtaatctgattctaagatcaaaatataatgttaatattcgaatntttggtacatttttctctataaacaaaactaatgaataagagttctacgaactcctacacatagtacatctcttctttcttttaaaatatattctctacataacaaatcaacaattgatatcagagttatcttcttacggaccagaacagaatgaaagccaaagtaattaagtgttttacaagttgtctttcctatctttgatggcanaagctatgatctttgacaatg

SEQ ID NO: 36165 - DNA, 440 bp, Glycine max
  unsure at all n locations
tgtctttcaaatcctttcttctctctctctctgaggatctgctcnnttttntctctctctcgagctctaactgtcgagtggaacgcgcagtgtggaggttccctagccctcgaacgctaggtatcattggtgctttcattgagcacaaggtggacgtatggcggagaatacgcgatcaaaagctatgtcatcggaaaaaatggaggagctgttcgcgaagtttgcggcaacggtagaagcaaaaatggaatcattagcggagaggttagcacatcttgaaaccagtagattcagtccctcacaaacacagcctgagatgccttcattcccggcggcgggaccgagtgcagcaccgcaccgattgaagctggatgtgccgaggtttgacagctccgatgctacagagtggatctntaataatacgcaatatttcgaatatc

SEQ ID NO: 36166 - DNA, 399 bp, Glycine max
  unsure at all n locations
cacgaggccgctgttgtggagagaaagagtagggaccacacacactttctgttgcatatctttagagaagtacaatcttccagtggtgcctagtgctagagctgactttcaacatacaaatcaaaagaaacgctaatagcataagacanaaggagtgacaattaccttttgttatgcaacananactattgattgcatgataatagaatgaagcanaatgccctcatcacttgtctttcacaaagcatgcagttattcaaagagaagaatataatgtatcctgtacaataaatngggagtaggcataagacagatatcaaggaaagtagcttaaaccacagtctcgcggctactgtntcactcaagcacaagtggttaagcatttcatcaataacaact

SEQ ID NO: 36167 - DNA, 468 bp, Glycine max
  unsure at all n locations
tatccttatggcctgcctccggaccttcacccccgtgccacctcagaagtgttaagccaagcccctacttttgaggggcaactcccaccatatgaagactatcccgggcaagacgatggggaaggagatacccatcttggccccctgctccacctcaaagatccgtccccgcatgaactaccccaacagaacatattccgtcataccccggcctcacccacacccgtaaaagaatctgttccctttgcagaagataagggaaagattgaggcgcttgaagaaaggttgagagcagtcgagggcctcggcaattacccattctcggatttagcggatttatgtctcgtgcccaacatcgtcatccctcccaagttcaaagtaccggactttgataaatacaaaggtatgacatgtccgaaggggcatcttcngatgtattgccganagatggaggcgtattctgcggac

SEQ ID NO: 36168 - DNA, 462 bp, Glycine max
  unsure at all n locations
agcttgtntaccccatgttgaatntgctttctttatagctgttcatagcaccactaattgttctccttttgaagttgtttatggttttaacccactaactcctcttgatcttttgcctatgcctaatgtttctgtttttaagcataaagaaagtcaagcacaggcggactatgtgaagaagcttcatgagagagtcaaagatcanattgagaggaaaaataaaagctatgctaaacaagccaacaaagggagaaagaagggtgtcttcgaacccggagattgngtntgggtgcacatgagaaaagaaaggtttccggaacanaggaaatcaaagcttcaaccaaggggagatggaccatttcaagtgcttganagaatcaatgacaatgcttacanagttgagctgcccggtgagtataatgttagttccaccttcaatgtctctgatnntatctcttttga

SEQ ID NO: 36169 - DNA, 466 bp, Glycine max
  unsure at all n locations
tctgttggaccttgaacaagcaatcaactcctcntcagactatgctatgtgctcgcgactggtccctttcttcccttcgcaacttgagttcattattgctaccccatagagctccgcgaaatttgttccggccatactcttccttgcgagccctcttggtctcttgttcaagggctcttgcggtaattgcattctcttcccgtaacccggcgcactccttccgaacgtgtgtagcagccaacttgaacttctccttggcgagttttgcctttcctaactcgcttttgagagcttggacttcttcgtcctcttccggtgcttcaaaattctcttcgctgacgacttttaacttggcgagccaatctaaacctcgtatgcgaactttcagccattcatggtacccaccaatgatgccattacgaatgcctctaagctcttgatctttccttaacggagtttcccatgc

SEQ ID NO: 36170 - DNA, 386 bp, Glycine max
  unsure at all n locations
atatatatagccagaaggggtggttccctanaataacggacgagctcacctcagtatcccccataaaaagacaagctcaccagcgttatatatgaagaaccgaacccaaaggtaatgctatatatctttcatctgcttagatattccgagggttttgtttggattgatgagttaataataaaacaagctaattaaaatgaatatatgttagttggtcttgtttcttagaataagatcataagatgaaatganatgtattgaaacttacacaaagctatttacattttcttttcatccaataagcttatatctctcttactatatatatatatgnggggctatggaatataattaataactaactgttcactaatataatatatata

SEQ ID NO: 36171 - DNA, 455 bp, Glycine max
  unsure at all n locations
taattattcatgcactatgtgtattttaatgnttcaaaacngtgngttcttaaatctaaatagcttagttggagaattaaatttaaaaaataattataaaataattacataactcttcatgcgatattcacacctttataacataattagtagtatctaacaccttatattttgtatatataattttaaaaataattataggaattcattaatgtacacctacctatttttttagaagtagttactaaattacaataagattcttaaaatacatcccaggcctaagttgttaagattatgtttaataagatattttaggagtctataagttattttgactaaagtaaacttgtctaatacatgagtttantttttataaactaccttaagagaacttattttgataagttacttaaacttataaaagataagctaacttaaaagtttcttttcat

SEQ ID NO: 36172 - DNA, 467 bp, Glycine max
  unsure at all n locations
agcttcatacaactgagacatggtagaataatagngtactccaggcatngccgttngctgagatctcatcacccttacagactatcgaaaaaagcttttaatggaagtcaagagcacgaaactgcgctgataccattgactggtgaataggtcttccagtgggttgaacacctgaatactgtatttggaaagacctaaaagaaggataaaagtaagacttgcatatggaagaagaggtccattttctttgatatttcgtattggtttgatctagatgttagacattgtatcgatgttatgcatgtggagaaaanagtatgtgatagtgtcattgagacgctccttaacattcaatgcaagatgaaagatggtctgaatacccgtcatgatctatctgacatgggtatacgatcgcagttgcatccaaagtctggtgggaaaatatacttgcctccaacttgtcatac

SEQ ID NO: 36173 - DNA, 467 bp, Glycine max
  unsure at all n locations
agaaactcaagcttaacagctaanaagtttgtacagaagaagaaaatttaaagattttntntgtcattatgatatggaatatccaccaattttgctgatgattaatttccatcaagtaatccaattggtctcctttaattgaatttctcttcccaatcatgttttttcattcacaagactcgaatataaaatcttgtttaaggagaccacaggactaacgtatgttgctggtaaaagtacatggcctcacttttggtttattagtaaacccgaaaaatgagaaattgcgggttgatatggtttctcaaataggaagggttgtgttaaaggggtatgaaaagttgcagcatatgtatgtgactttctgttagtagagtgttacattagtaatatgttcctatgcatatcttctggcattcagtgttttcatgttcaagtcgtactacttgacaatatggtatgtactc

SEQ ID NO: 36174 - DNA, 473 bp, Glycine max
  unsure at all n locations
ccgaacacaanaggagagaaganagaactattgatcagctagagaacaccccggagcgagaggcatagggatagagcaaacgctgaactatnccgagcccaaagcaatgaccacaagaaaggggagtagaggctcaggatgcaccatagcggacctggtagcacaccacctggccaacagacagagccatctggcattcaagcaccagaaacagctgaagaaacggctaaaacggatcacacaccacaagccaaaggcgaaggaagcataacgcacggaacagaggcgcacacacccgactcgactcacgctgtacgcatcaaaacagaaacatgggagaccaagtcgcgcacactgcgacgctgtgacaccgacacaagcgtacctaaatggatctcggacagctggataaggcacaacaanacagcaccgaggcagcaacaccggctatgtagaggcaataacgcaggaag

SEQ ID NO: 36175 - DNA, 411 bp, Glycine max
ccttcttatccaaggctcatcttggtggtgaagcttcttctttctggtttatttacctagtggatggtgcgggttcttacctcttctcctttgtcttccgctgcatctccatggtggaaaatcaccaataaaggacctcattgaagctcaaagatccagcctccatagaagccccacaagcaagcttccatcaagtggtaatcagagcacaagagcttcaagtaggtgctccttaaacctccattaattttttttgctttaccttctcttacattgacgtctcttcatttttttctccacgtatctcctcatatgtcttgtgctaaatattgttaacatgattctttatagattccaccgattaaacttgctatagaagttacatttgattttctatggttcaaatttctt

SEQ ID NO: 36176 - DNA, 59 bp, Glycine max
agcttcgatgccgatgagcaggtcatctcgtgcgcgctcaaggagctcggcggcggcgc

SEQ ID NO: 36177 - DNA, 429 bp, Glycine max
gatgcgcatccacccggctcgccaccgcacaggcccggattaccttatcggcatgcatggtctttgcagggcatcacaactttcagaatttcatggaaactaaaaatacttatgtagaacaatcacttgacctgcctgcaggcgcgcctgtgactgtcccccaggcgactgcaccaccacagtcctctataagacatcatttatcagatgactcggccgcacggccccggcttcactcgtagaatcgccgcttggattcgccggccagcaccgctggaaggcgaacaaggagttcctagaggagtcgcctggcaacgctccaggcatcgttggagacgagcctgcaccccaccggtgcaggcttttttttgcttcagcgcatgctcatggactggcgcttccaggccgggtcctgccagcgctggaaca

SEQ ID NO: 36178 - DNA, 260 bp, Glycine max
  unsure at all n locations
tgctccacanaggccataatcatcacagcggtccccttgaactgagaattctgagacccaactggaatgatgatcattccttgaaaaatgctgattcaaancaaactgactcagcacataatcttgatacaatggtgtctntggtctcataagagtaagacacttcatcagaatcanaaacaaaaatgggtntgaaaactggatttgcactgagaactggatcacctttgaatattgcccataccatggtccacttctga

SEQ ID NO: 36179 - DNA, 445 bp, Glycine max
acacttgagaatactcacccttgctgttttattataaatatcaataattgtcagatccacctggttaaggttcacaaaataacagccattgtatcctatccacaccaaggaaaaacatattacaaacaaagacaatatagatttaaaagttctgagcaaatcagtgtgagttattctgcataagaactcagaccaacaatcatggagaacagcaaattcttcgtgatacgactggtataatcattttctttattataagaaaaattacaaacgttcagcaatggttgatagaatacatagtgtcacaagataaccccatgcaatatccaaaacagaatagggatctcaaaggattagagagaatattaagaaaaaatagtggaagcattataacatatataaacattgatgagtgatgacaaaggaaaataaaattaaacaagcc

SEQ ID NO: 36180 - DNA, 453 bp, Glycine max
  unsure at all n locations
tatttgatctaatggatctganaagaggcanatgtaatcatcatgcttagacgaatgagaaaactggngcanataaagagggtgaggatganggagaaacccatgctgtgacttgcatttctgtacngncaagttttccaccaacccaacaatatctttactcagccaataacaaactttctccttacccaccacccagttatccacaaaggccatccctaaatctaccacaaagtctgtctaccgcacttnncatgacgaacaccacctttagcacannaccaaaacaccaaccaagaagtgaatnttgcagcgagaaagcctgtagaaatcaccccaattncagtgtcctatgctgacttgctccatatctacttgatanttcantggtagccataaccctagccaanggtcattcaacctcacttttctgangatacgactcgaacgccn

SEQ ID NO: 36181 - DNA, 418 bp, Glycine max
tgttaaaaacggaagaaaagaaaatgggaaatgaacgatattaagatgaaagctaaaaaacaagaaatgaattgaaagtctcagattcgaaaacttacccgttgaagaatgaagaacgaatgaagaatgaatgaagaacgacggaaaaccatcatggatttgctcacgaaaacgtctcggaagcattacagaagcacctcggcttggattttcttcacggaaacaattttttttcaccagaacagctgaaatgcatagccaggggatccgggatccttggaacaaccccctttttctttttttataggaaaaggggagaggaggttgctgcccagctcgcccaggcgagctgggttgcttcctttagaagcaaccatgcttcgaaaatactctggaaggtccaaattcaaaatttcga

SEQ ID NO: 36182 - DNA, 396 bp, Glycine max
  unsure at all n locations
ttccggaaagaataactttaagatccagataatatgatgtattataccacataaccagaaacgaacaccctctgtcattgctgcatatatagcttgagtcaagttcttctatttaagaatatggtttacatatagtaccgaaaaaaaaaacaatataggttatattgcgttgctttgactaataatatcgtattgtagaatacaaatatgttgcacgtctgactcttaagaagaacacaanattaagaaaagaatcanatcagtaaataaccagttacgatggacaacataagacattgatttttttttacttaatanatatgagtcaaattttttgttccaaataaaagatattaaatagattacaaaaatctaattntctatttaataattata

SEQ ID NO: 36183 - DNA, 442 bp, Glycine max
tcaacagaaggggtccttctcttcagtatgcatatgatcttggtttatcttctgaccatcttaggatcgtatcttattcctttgttggaccggtggttcaacccggttcagcaccctttggcctccaaaccgagttggctaagatgactgctcaagaaatcatggaggctaaggcccttgcagcttccaagagtcacagtgaagctgaaaggagacgcagggagagaatcaataaccatcttgctaagctgcgcagcttgttgcctagcacaaccaaagtaagtctaattaattaattaatttaactaaaattaaataataaattcttcccataaattaaccacgtattcaaattataaaatatgtatattttactattatgaatcatgaattggctactactagttcgcatgtgtaattaatcatctgaacaaatactaaa

SEQ ID NO: 36184 - DNA, 380 bp, Glycine max
  unsure at all n locations
tttcttgagcaagtagcctggcctgaagctcaacttccattggtgagacccaacgaggctactccgcctgagcccacctgtgcaggttgatccagagccaactaacccacaatctctagtggtaaatccactatcttctcttgagcgtgaagtagttcccccatctccacctctgattatcatctccgatgcatcatctgatgaagcagctgcccctcctgattcaccaaaaggagaatacagctgaccttcctacttcctagttggaggaatttctgattcgtcatctggagaagctttaccctcactgattcccagttagacactggtgacatgtgatcctgatgacctnttgcttttggttatattataatatggtt

SEQ ID NO: 36185 - DNA, 459 bp, Glycine max
  unsure at all n locations
acactatgaatactcagcttagaagtgtgctaactaatgtttaataaggatgtagggactagtttgtctaacttatgtcttatatgtcagcaagaaaggaaactcttttccatcttttttgtgattgtatggatactaagttgatgtggcaattttttattcgagtataaggttcaatacaacatcaattctttcataaccaattgtcgcaacctacccttttgcgggtgtcgcaacatgcccttttgcgggcgagcgaaggcgaggctcacgggtgcgctttccaaaggaggaaagatgcgcggagtcgccaccaacgtttatttgtgggaaacgtcggaaaaaccgaaggaaaccggtcgaaatgaaaattctaagttcgggagttgtatttacgtntcaggaaggtattagcacctcttacgcttgtcttaaaggacaacagcctatttttaaaat

SEQ ID NO: 36186 - DNA, 443 bp, Glycine max
  unsure at all n locations
agcttattattcgtacaccanaatgtgttccnttgagtcttatnatagaacccaccaaccggaccaagttgttgtggtggngtggagtcttgagggagactcaagcagtgtatcgaggggaatctccactaaaggcctgcgcaacacaacaaattagagacttgtctagtaaaaaaggcaccttgaatctaagtaaaaaagaacactctactttaactcaacttcacgttattctactttnttttactggcttcacgttattgtacttgaaacagctaaacttcatgcanaaaacaaattttcaagaacgtattgtttttttattatttaaaataccaacttagagtgaaagtcgatacagaaacagcaagacactcataaaatggaagataaaagaatgtgatgaccaagttaattcaacgcaaccctttatctcagactta

SEQ ID NO: 36187 - DNA, 434 bp, Glycine max
  unsure at all n locations
tataaagcttgggaaatcctcactttacatgctaatttgtggtggttgacttgggtcctaaatcctaattgtaagatagtatcagagtataaccaagatccattgttgggctaacctagatcaattgggccacctgcattcccacattccaggctggtagcctagagcatgaaggggtgtgtgttgaaaagccacttaatcacggtcaacctatctcgccttagttacggcctctttgggggctgtctttttttttatcagcaaaaatatataattatattgatatgagtaccagaggtacaaaggttacaatttaatacatcaaacaaatggttccaatatcagacttgatgtagtcttaattgcagcctcaagggtggtgcttttttaggccacatcgactagagatatggcttanatagagcttataaaga

SEQ ID NO: 36188 - DNA, 409 bp, Glycine max
  unsure at all n locations
gctatgtcctcgcgactggtctctttcttccctccgcaacttgagttcactattgctaccccatagagctccgcgaaatttgttccggccatactcttccttgcgagccctcttggtctcttgttcaagggctcttgcggtaattgcattctcttcccgtaacccggcacactccttccgaacgtgtgtagcggccaacttgatcttctccttggcaagttttgcctttcctaactcgcttttgagagattggacttcttcgtcctcttccggtgcttcanaatcctcttcgctgacgactnttaacttggagagccaatctanacctcgtatatgaactttcagccattcgtggtacccaccaatgataccattacgaatgcctctaagctcttgatctttccttaac

SEQ ID NO: 36189 - DNA, 437 bp, Glycine max
tatagaatatataataaaagaactatgactattgaagaatcattcatgtttcctttgatgagtctaatgctatttctccgagaaaggatattttagatgatgttgcagaatctttagaatgaatgcatattcatggacaagattctaaagggaaagggaaaggaagcaatgaagatcctcccgaagaagatcatccccttgacaacattattggtgatatctcaaaaggggtaacaactagacattctcttaaagatttatgcaataatatggcttttttatctatgattgaacctagaaatataaatgaagccatattagatgatcattggatagttgctatgcaagaagaactaaatcagtttgaaagaaacaatgtgtgggaattagtaaagaaacctgaaaattgccctatcataggaacaaaatgggtattt

SEQ ID NO: 36190 - DNA, 522 bp, Glycine max
  unsure at all n locations
tgggttctgccagttcnnacttgtcggncnctnnanaangancgccgctgcagcnaaagagcagagtaaagcannactttttattcnccancctaaccgcncaggnggaactcatgcgcgaccgccccacncaacccaagggccagacttacacgcgactgagaacaatcaggtggagaagaggntcgaggacttaactccttaatgtgtcatagacactctcttgggccctagtatgttatacttactaactactatctctatctcttttaaaaagatgagtaatcgcttattctacactataatttgtttcttatgaataggaacaaatgtagtatacttctaaagcaccttataacacaaataatagtcataatagtagtaattaaacatcaccataggacggcatantaatgacaatataagacagggtacgatgaccgtaataatactcacaatatcgatcacatgcattgatcatgtccacaccactattataaatcaccactaatggactaatag

SEQ ID NO: 36191 - DNA, 432 bp, Glycine max
  unsure at all n locations
taatcaaatgatagatgccctaagagatataaacattnntaatangaatatatagtaaaaaggcaaaacaaaaaactctatgcgttggagaggcctaatctctcttaaggtcccaattccaaatttcatcctaccccccaatgatttcctccactctctgcacaaccaattcacatgccttatgcctactactaatgccaacttgaaaattaattaagcaatttctctctcctaaacttgagcaagtgcattcaacctcctccttctccttaattttttgcttgataagctttgcgttctcatcatgtatttcctcctccttttcctcttcaataggagcttcaatagtgagtttagtatgttgtctgatgagtctagatggctcactatcttcaattgcatcaccaacagctccccaagtcaagctatcat

SEQ ID NO: 36192 - DNA, 462 bp, Glycine max
  unsure at all n locations
tgcaagctattaagcccaatcaaaacccacgtcgtcacatacccgcacacaatcgcggnccacgggtctactacggcacagcccgatgtaatcgcagcgaacccgtcaagcaggccgttacatccgtcaatcgcgttccaatggcccaccaataaccgcagtgctcccagccaatgccgtcgtgacagctgtcctccctatcgcgctccattgaccataatacccttcgctatagtgataaacgaaccagggttgaagccgtaccacccgaaccacaacataaacgaaccaagcacaactaaagacgcgctgtggccacgcaaagccacagaccggcccgtccggtcgaaccggncgattctcgggccttcaattaaagccccccacatgctcgctatcccgccaaccatgtgaacaacgcctgagcccgcaaagtcgatgactccagacccgaacaaaaca

SEQ ID NO: 36193 - DNA, 467 bp, Glycine max
  unsure at all n locations
ngtcactgaatcatgagaagctgttccaaggacacacccaattcctgctgtcaaaacccccatgaacttgaaggaaataatttatatcaatcctattaaggacggctgtctagttttcttagtattttatttgatggcatttttatcctgtatctggttctctttgtgtgtttatgctttcttttttctctcatgattcctgccatgttaatgtttataatataaatattttctcacttgcagttctactttcaacatggacgtccacctccaaatgaactgaaagaagaatgcttgtttaaaattgatcggctattctatgatcatatggatggcatgcatgtgcatggtgagatatcacacatataagtagctgatagcctgaagggcaattttgttgcaactggtgaaaagtgattctaaacaactttcatattctaatgttgtatataattatgccctcttta

SEQ ID NO: 36194 - DNA, 414 bp, Glycine max
  unsure at all n locations
agcttcaacattcaatttcgagcgtctcgataagttataggactcaatcaaacatccgagtgaaaagttatggtcgttggtattggctcaaagcttcaactatcaatttcaagcgtctcgatatgttacgggactcaatcagacatccgagtaaaaagttatggtcgtttgtattggctgagagcttcaactttcaatttcaagcgtctcgatatgttacgggactcaatcagacatccgagtaaaaagttatggtcgtttgtattggctcagagcttcaactctcaatttcaagcgtctcgatatgtnacgggactcaatcagacatccgagtaaaaatgtattgtcagtntgataggctcagaggttcaactttcaatgtctagcgtctcgatatgttacgggactcaatca

SEQ ID NO: 36195 - DNA, 462 bp, Glycine max
  unsure at all n locations
tcaccttctggtcctcctcatagttgtggcatgataaaacatgctctattttcatctcccactccaagtaggcctccggatcattctttcctttaaatggaggaatgttgagtttaataccatcaattcggttttgtctaggaacaccatcattccctcttctcctcctttcttcttcattatgatctctattctccatttgatccaacctctcatggagcgcatcatctcgttgtttcattaacctctccatatgttgcatcaaagcttgcatttggaattgcgaaagccccactccatcattaggattagtacctgacatctcaaacaaacaaatcaaacgtaacaagacaattatagttgctgtttgaatacctcacccactcaagtgtatcacacaattatggctnttctctaatgaaacactctngccttttaccactctaattccncttgagttct

SEQ ID NO: 36196 - DNA, 545 bp, Glycine max
  unsure at all n locations
ttttnattacgctgggcctttgtatgntcgagatnctctanagnagaccacgcggcaggcatgctgacttgaaggtcgtgaacaccaccatcactactttagaacactgcngacangncgacngagagagggatattcnctccctctgcaactggaggcgctacttgagctgccatatatctccatctttgggcgtatgctcagaaagatccgtgccctctctttgcacatgttctataagggcatgctatccgatgccattatactgacacagcctagcgaacgcaaccattacgtccttccaagactggactcgggaaggttccaagtgagtgtaccaggtaacagctaccacagtatgactgtcttggaagtattgtatcagcaattcctcattctntgtgatgcccccatcttccgacaatacatctttagatggttcttggagcaagttagtccattgacgtcgcaacgtcaacaccttgaacttgggaagggtgatgatatcggatactaagaacgactcttctaggttagcagatgcn

SEQ ID NO: 36197 - DNA, 463 bp, Glycine max
  unsure at all n locations
ggacagagatacaganattatttgagctagatttccatatgttcaagaattgcactgtgcattgagtcgcaatgtacaaggttcactctgagtactcatatcccaatagaagttagcacactaatctagaagattaggataagatttaccaatggatcatgctctaagcttcttctacaagtccatttaaactccaaaactcaccaaagtagctcattcttcctccattttcacaagctggtcaagaggaaaggagacaacatttccactcctttttaaagcttttccaagtgttcttgagcccttcttccatcaagcttaggtaaatgacctccattttcacttctaagcttgattnttacttcattaccttgctctattctcactcgtagtttcttatcttatttttgcactattgaaggttagaaactagaacctaaactccttcattcttccttctaaa

SEQ ID NO: 36198 - DNA, 464 bp, Glycine max
  unsure at all n locations
agctnttgagtgcgatctataaagcanatagatgtctataggctttgtagaagttaagcactgcaagacagcattggcatagcaactgcaataataaagagattaaaaaaaattaatgattcagaatataccaagaaaggaaccatatatagatttttgcaaaagtttatcttcaagtgaatcanggctcattnttacatattcaagttagatgagaagtttgaaaacaaaaggtaaatggagaaagttcacataagtaaccttgaaagggggaaaccttccctccccanaacttttgctgacataacaataataataataatctagttgttgaataaggtacagcaccacttgacaaatgacaaaagttaatatctattattaaatgattaaatctatatattcaacatttctttcttatcacaatcgtagtgttttaatggtagtattacctgttcccacaa

SEQ ID NO: 36199 - DNA, 431 bp, Glycine max
  unsure at all n locations
cgcttaaaggtactttcatacacagtaaataaatgaggaagaattcttctagagaaaataagttatgtattataatgtaaaattattttacattaatattcaattataaattaacatatatgataaatttgttgatatttataataactaccttgaaaatcgtaataataacgatattttattagtttagtataaaattattttaatttgtcatgactattaaattctttaaatatttaatataccactattttcataatgaatgatattatggtgatcagtgttatgaacaattttaataaatgtaaatgttaattccttcgccttaacttcaataacttacaaattntataaatgtcattgttttatttgaataatataacatttgaattaacataaaggtcaaaggatgatcgtctatttagcttaat

SEQ ID NO: 36200 - DNA, 299 bp, Glycine max
  unsure at all n locations
gtgggcctggtggctatttgcacccctattataactaaatatacccccttgctctttattaggtgaatgttttcgtaacgttacgaaactatacgaatttcataacgatgctcgtatgctttctgtaatgttacgaaaccttacggattacgtaatcatccgttttttgcctttcggaacgtcacacaactttatggattgcgcactaacacttccttttaatttctggcatgtcatggaacttcacggattgtgctaccatgctttctttngacttccggcatgtcacggaacttcac

SEQ ID NO: 36201 - DNA, 428 bp, Glycine max
tctacgaccacgacatggcaaattggggggtaccttactttattactggtaaattttgtgttcgtaatatgttacattggattatgatgtaaacatgtttttatgttatgttaacctaattttttttgtagtgctggatctatgagcattttttgagtatgcatcagtttgtcatcgatgatgcgtatgaggagacgtcccctcgtgcctcccggtggctgatgacgaaggctcatatgaagggaattacaggagcgtcgtaccgggcacattgtgattctttaacgatcacaaacgtgtgttggttgccttacagtgaccatcgaggggttaggggatttgagctgatttcatcattccagggtcaactgagatggggtcctatggtggtcacagttcgatcggaaagggtgctatgccagtttggg

SEQ ID NO: 36202 - DNA, 469 bp, Glycine max
  unsure at all n locations
agcttaatgagtttcttgtgtggtctcttgattaaattgatgcatgtttaaaaaagtatcatgtcccagacgaaagtatttctctattcagtgttttctgcagatatggngaacgggatgactcanaatccataatgacagattgctcctcttcagtatcatctggtctggactcagattggtgttgttatatcaagttgagaatgaaagaaaaaggactaatcctattagtagtcatcagatagatgaactatgtttggatgaatcgttgcgatttgagacattaaatcaagtagttgaggctgcgccagattcctctacccttgccaaaacctttgattntgttatgtcaaaagatgctggaagatccagtgacttagcanacgcaagtntgtccatgagtgagttttcggtcanaagccagcaccggtgcgctacaatgagaaaccttctggagtctcttatcaca

SEQ ID NO: 36203 - DNA, 425 bp, Glycine max
  unsure at all n locations
tgaagagaatgcaagagagaggataaggaaacctattattttaacatggaaagaaataaaggagtttataaggaagatattcttaccaccttattatgagaaatatgtttatgataggctacaaaacctcacaaaaggtagcaaaagtcttgaagaataccataaagagatgataatgaccattaggaaagccaatgtacaagagcctaaaacttccataacaaggttcctatgtgggcttaataaagacattcgatgcattgtgaagttacaacactataagagcttggaggatatggtgcatcaagccaagaaagtggaaagacgacttgagaggaagcattcctacaagaagacctatcaccatgactcttcccgtggtaaggacaagtctaagaaatagggatcttccncacctgtaacat

SEQ ID NO: 36204 - DNA, 419 bp, Glycine max
  unsure at all n locations
catgcaagcttgcacatgtttatgtatggattcttcctttttttgtggaagaacacaagaatcaanggcatttgcttctaagggttgatacattatctcctagccaaattgatgccatttctggagttctgcttctggttagagtaatgactatggcttttccttgttatttataagataaactagcttggttttctatatacttgggatagtaattagtaaacataattatgattatgaaattccatttctcattatgttgatgatgaaatgcaatgatttcgttgagttagttattgactcttgaacatgttctggtaggataaagatttcatgccctcttgagtgcggtgctcctacatttgatgctggccatgcttttggaatggtggttgttattagtctcattagttgaagta

SEQ ID NO: 36205 - DNA, 416 bp, Glycine max
tgaatctgaagctgaactatcgggtctgaaaatcaattttgctaagagtagattcggagctttcaggatgtctgatcaatggaagcatgatgcagcaaagtacttgaactgcagctgcttaactcttctttttgtgtatcttggcatacctataggggctattaatgcaacaaaatggtgagctgtggaccagagttttgaattccaaatatggtggatggaggaaccttgaagaaacaggaaattcagcaaaacaatgtgtttggtggagggatgtaaaacaagctttcaatcaatctcaacagggactggttattcaaaataacatgaggtggaagatgggggatggagagaaagttacattctggacagataagtggattaatcaagaggagtcgctagcagataggtacccc

SEQ ID NO: 36206 - DNA, 414 bp, Glycine max
  unsure at all n locations
nngtctcaagtctgtgtgtgaatgatgtgcgatcctaaattagtgaaattaagaaggaagaattagtgcctagaanaaatgccactcaccaattcttaacctcggttttgaagatctcctggtggaaagggaagtgggaatttcttttaaggtccagaagacccctcttcacttcaaaaagggtcttgcacatgattgattaggtatgtcttccctgactatgttttcatgtggtctacacatgctagcattgcaagaatttcaaaggcatactagaatggttttctagtcggctaaggaggttctttagctctattccagagacctnggtggggctatctctttttgggggaacagatgatggattatgaagatcttctgatactcattacgaataagaatattttagaaact

SEQ ID NO: 36207 - DNA, 448 bp, Glycine max
  unsure at all n locations
tgtagaatggctagacatgatacatgtcagggcttggtttggttcattgataaaagggatgccccacattatttccatgacacaaatgcaaaaaatgatgatttggaaactttatgcaaaactggtcatgcatgcacctatgcggacactcaaatgtcaaatttttatggtcatgtgatgctagggctcaggattcatttcctctattttaatcaacccaatgtttccaaaatatgttcttttatcaatttgtgcattcatccgagtccatttcgggcgtctgggaaaatcttcacagcattcacccttcaggtgtatacacatttttttcaaaaactagttatgatcagtgaatttttccaaagaanagttggaagtcatctcttttcaaaagcatgttggtttttcagtntgaaaacttatttttcttttttctccttcttctttt

SEQ ID NO: 36208 - DNA, 452 bp, Glycine max
  unsure at all n locations
cttcattattaagcttctaacacacttcagacatcttcttaaagatcccaaccgtcagatcttggaaaattggtttgccaaagtggagacccaatttaaaaaagaacccaccggttatggagggttggccagtggttttacccgaggaacttcatggtactttctctaaaagcctcattagaagcctccttagaaccttctctagaagcttctcgtggcttctttgagaagctttctcaagaagctctttgagaagctacatccttatctatccacccctctattaactaaattaacttcctttaaaataattacggatgaaaataacgcaacanataatcaaacatcaaacataattactaataatatatagatatatatatcagggtgttacatggagcatctcgatatgttacgggactcaactggacatncgtgtataaagtattggn

SEQ ID NO: 36209 - DNA, 433 bp, Glycine max
tctagtctcaattgtgagggtctcgatatattacccggttcattcggacatccaagtaaaaagttattgttggctgaatttcctatgagcttcggttttcaatttgtagcgtctcgatatattacaggactcaaccggacatccgtgtataaagttattgtcatttcaattttctcagagcttcggatctaaattttgagcgtctcgatatatgacgggactcaatcagacatccgagtcaaaagttattgtcgtttgaatttgatacgagcttccgttttcaatttggagcatccctcgataaattacaacactctgtcgggcatccgagtaaaaagttattgttgtttgaattttctaacacgtttcgttttcaatttggagcgtctcgatatattacgggactcaaccggacatccgtgtatacagttat

SEQ ID NO: 36210 - DNA, 422 bp, Glycine max
  unsure at all n locations
cacttgaggaaagaggaanaanatattccaatttcacgcanacgacacaccgcgagggaggggggaagagacagaagggacaacaccccccccgagcagaacaccgcaaaagaaaaaaagagaggaacggcaaccgaagacgcaaacagacaacgcaaccagaagcgagggggaaggacgacgaacgccgcgaaggcggaagaggcccggaagcagaggagaagncgagcgcaacgaaaaagggacacgcgagaaacgcagacggcgcgcaaacgaaaaaacaacgaacacggagcgacacaaaaaaaacggcgacagggcgcgcaacaccggaggacggcgccgaacgaggacgagagcacagccagccagcacggacgcaagagacacggaacgaggagacacggagcgaacagaacacc

SEQ ID NO: 36211 - DNA, 438 bp, Glycine max
  unsure at all n locations
cgcggaagaatgacacgatagtttcttccggagagtgggtggggggctnaannccncacanccggcggggacattatagcacaaaatgatcatttcgaaaccttatgtcacactggacatgcatgcacccatgcctacactccgatgtctaatcttataggtcatgcgacgcaatgcctcacgattcacagcccccatttaaaccaaccccatgttatcaaaatctgttcttatatcaatttgtgcctttatcctagtaccattagggcgtccgggaaaatctcacagcactaaccctccacggggtcacacactacttccatcaactactcgtgaatcgcgatctttgcaaagaaacgctcggcgtactctcttttctaacacacagccgcttctctgaccgaagacacatctttcactctcccccactttactcat

SEQ ID NO: 36212 - DNA, 474 bp, Glycine max
  unsure at all n locations
agcttctaaactntgacaagaatgaagctctgataccacttgttagacaagtggcctcagatatcttaagaaggggggggttgaattaagatattcgaaactttntcttctaattaaaaatctatcttactttntacttaagttatgaattcccttanagacaatcttcttanatattaattcanatgaagcaacttgaatatgaatataaagcaataataaataaaggagattaagggaagagaaaatgcaaactcagttntatactgggtcggccacacccttgtgcctacgtccagtccccaagcaacccgcttgagagttccactaacttggaaattccttntacaagttctaaacacacaaggacaacccttcctttgtggtagagattctnacaacaagagactcacagtctcttaatcccttagagaatgagaagaagaagaggaacanatctctcttgaaagagat

SEQ ID NO: 36213 - DNA, 441 bp, Glycine max
  unsure at all n locations
tggttntgggcaatagcaccccacctgacgtccccaaggtcttctgacccccgcgacatatctccaggtaccactctgtggtcaacgaataaaagcaggaagtttcacccttctacacttcctcttttcaagcttgtaggattatggggtacccatcacatgtggtactaggtggcggtcgggcgatggtgcacaacaagtttttccacatccacaaatcgcgcataaacccaccatcccctgttgcccacctccaactgagctcacgtagcccatatcctcgtttctctcaacaccgagtccccatcaatcctcccaagcttccccaacatccaagtaattcaacattcaaacagcacaaactatcacagccaagaaaacagggcaaaggcagaaaactctgcctaaaacaccaaccaaaatcacagcttttcccactta

SEQ ID NO: 36214 - DNA, 459 bp, Glycine max
  unsure at all n locations
ttctctttgagtggacatttggatatggatatatggatatggggtggtgccattctaagcccctatattttccttaggtccttatggcttcttcttgtaggattaaaagaagtgtttttaaggtcggtacctttcttcagtgcataaacctctattttattggattacaagcatgatcataatcgatacacaagtgtttgtagctggtagagaagttttttgtatcgatttaatctattacaagctaattgtaatcgattacatagttcggntgagacaatgggtgggtttcaggagtctgctntaatcgattatcagatgatcatnnatcgatactttgctctttaaagtgtcccagaagtgatcaataacacttttatcgattganatgattatatantcgatcacttctttttgaatatcgattacattgggatattaaatcantataggtggttn

SEQ ID NO: 36215 - DNA, 483 bp, Glycine max
acactcatagaaactcaagcttctacttatgtttgtgagcttcatgtaattacaactgcaatattcaagtggcaccactactttttgggtcatcctttcatcatcctgactgatcaccaaagcttgaaggacttaatgacccaagtcattcaaacaccggaacaacaagtctatctttcaaagctactcgggtatgattataccattcaatataaatcagggtcttccaatatggttgcaaatgctttattaaggataccggcaacaccgaccttgtaactattactctccatccccaattctctttttatggaacaatttcgtcaagcatgtcaggcgaattcctcatatcaggaacttttccaccagatacatctgcaccccgaagctcaccccagcttcactattaaataggacctccttttcttcaatgataagaattggcttccttccagccatgatttcactaatttactcatggac

SEQ ID NO: 36216 - DNA, 440 bp, Glycine max
  unsure at all n locations
agcttgagcacctccttccttacctcttccttcattgttgggttcagccttctctgaagttgtcggactggcctgtagtcttcttccatcattatcttgtgcatgcagtaagcagggctaatacctttaagatccgatatatgccacccaattgcttccttgtgtttcttcagaatttctactaacttgttttcttcatcggatgtgagtgtattgctgatcaccataagcttactctcatcttcttctangaacacatgcttcagatgggtgggaaatatcttcaattctaccttcttcttcttagatggagtcttgctctttagttcctcanaactggcctcctcctcanggatgttatcttgtcgatccaagtcttctaagcaagccttgagatcttcttcttcttcattggttaagcaatctatcgcattcaccat

SEQ ID NO: 36217 - DNA, 435 bp, Glycine max
  unsure at all n locations
tcagcacttctgtagggtttcagggctttccatcagctctgtattaatctgccatatactcagccggtattaggcctcatgagctttctcatattcagctgcttactggatttagcttgggtggcttcccttttagatacttgggtgttccccttttatcatctagattaaatgtatatcactatgctcccttgctttccaagattactggcctgattcagggatggagcaggaagtctttatcttatgcaggtaagctagagttgatcagagcagttattcaaggaattgtgaatttctggatggggatttttcctttgcctcaatctgttctggaccggatcaaggcttcatgccgtaattntctgtggggcaaagcggatattggcaaanacaagcccttggttgcttggtcagtagtttgttctccgaaaa

SEQ ID NO: 36218 - DNA, 560 bp, Glycine max
  unsure at all n locations
acggggnagatgcctgtcnactcgcatgntctngangatcttnaanagaccagcctgcatgcatgctagctcattgtaactcgacattaaacatcattattgtttactaagatgagactncgaattgagacgtgtaatgtgagtgttggtgcctattatattcacaatactaattcctcaaatttaaaaaatgatattacttgtcgacttaagttatgttattatcgctaaacatctcaattacaatgtgtgagattaatcgaatgtgatctcgtacttgtgatgtgcaatatataatcacatcttaacaattaagacacaattgaattgattaaatgcgaacatcagaacaaactacactaatcatccttgagattcttgaaactaccatttttatcggctctctatctctaactaatcttgcttaattgtgtgaaaaatattacacggagataaagctgctattgatgttaaaaaatatgacgagttatgtaatctccaatgttttacaaatattagtgcaatcaagtaaaataaagttgcaaattattatcaatccn

SEQ ID NO: 36219 - DNA, 447 bp, Glycine max
taaagataaactaagaataatgataaatatatgattagatattcgatcagtattattagcctagctaatcagtttgtatttgatagaatatattatcagaatataagataagatattctatcattattcttagtttatctttaagcttgtaatcctttatataagctaatgatgcttaacgaaaggggagagaaaaatattttttccctcatcccttgagctaggttttggggttgagttaggtctctcacattatacgttagagccttagcgcctttctttggctttcgcacataggccctagcgccattcagcccctttctttttcttctccatcatcatgtctcactcaaactctatctttcacactgcttttgttgtctccaacatcaataatcatatcccaatcattcttgagatgaaaaatatccaatacgtgacatggac

SEQ ID NO: 36220 - DNA, 331 bp, Glycine max
actttggcatatacaatgactccagtttcaaccacattgaggctgctgtcttttctcttgcaacttctcttaaagctttatctccaaagatataatgaatgcacttctggctttatcaatcatctctgatttctcctttgagcttagagattcagacatactttcttctcctttaagagcttctgcacaaccatgatgaatcaagaatgctttcatcgtgattctccataacccaacagcattttcccctgagaactctctatatcgtactatgtgtcccatctttcttgatctgacctttcccacaacgacgccacttgtggtctagtat

SEQ ID NO: 36221 - DNA, 428 bp, Glycine max
  unsure at all n locations
tcgacataatctacaagcttcgtatggtctgaaacaggtataatggcatggtataaggaaattgacggttatcttctaaaaagaaggttttaagaagagtgaaaatgaagtcactttgtatgtgaagtgataaaaaaatgaagtgcaactcattgtttctttatatgttgatgatttattttttatatatagggtatcaaattccttaaaccaaatcaagaatgatatatatgaagaaatttgaaattatagatttggcaaaaatgaaatttggaatggagatctcactactagaaaattggcgttttacgacacagacactacgacgattattgnggaaccgccttanaaagatgtgcggtggcttttttgtaattatttgaacaatattaggattttacgatattaaatttaagacggttattaaa

SEQ ID NO: 36222 - DNA, 308 bp, Glycine max
  unsure at all n locations
atctgctcccactccatgagggatgatcaaattgagttgtgtcgctgttcttcggtgttgtcggccattcagagcgttgcagagaaagagagaagggttggatctacggtctgacagaggaataattgtcagagagagagggagaaagcattgcggacaaacaagagtgaataggcagacggaagtgaagaattagtgccacgttggatagtccacgtgacactaanactaccaacaatgcacctcattaatggtgttactttacaaattaacagaatgattatattgccaaacttatgcaatgatta

SEQ ID NO: 36223 - DNA, 427 bp, Glycine max
  unsure at all n locations
tgtcatactttgtccaanaaagagaaaatcagtttttgcctgtgtctgcgccgggttaaagtcctacaaggatactcttcaaatattaagagccttgtgcagttgaagaagcttaacctagtggggttaaagtctcatgattgtcacatgttgatgcaacaattgttagccgtggccatacgagacattttgcctaacaaagtcaggttagccataactcgcctgtgctttttcttcaatgccatgtgtagcaaagtccttgatcctgtcaagtttgatgacctggaaaacaaggctacaattatactgtgccagttggagatgtattttcctcctgctttctttgacatcatggtccacttaattgtttaactggtcagagaaatcaaatgttgtggtcctgtatatctgtgctagatgtacccgg

SEQ ID NO: 36224 - DNA, 454 bp, Glycine max
  unsure at all n locations
agcttatccctccaattggtactgtcttatggattctaatcccttctagaggtggctaagaatgttgacttaagtttttcttttgatcgttctaccaatgcttgtctttatttcattatgactcatatgaaggcgacaaccactgccttgggtgcagaacacaatgtctttcttctatttcggttctgtaagtattgtatatgttcttcttcaaaggttattgtttttgaatatcccccccatgtcactctactcaaatcggatgaccctaaagccatatgagtgctattcttggtgtctctctacagatctatttttttcctcttagacagaataaggactaagcataatcattaatatctattatcctatgtttgcgactgagcaaccaatatcaactanatcacttgatcatcatgctaaacaccttactgtaggtgaatctcttcggatc

SEQ ID NO: 36225 - DNA, 423 bp, Glycine max
tgtagcagcggatttctttcttctcttcacattcttatgaattctcagtagtgtccagattctcatttttcggttactcaacgtgcgttcacataaatgcaccatgcaagtggttgtgaacggtcttcagtatttataatggcacaccaatgctttcatgccaattgcaaaatcatggaaatattttttttaaatatgtttggtcctctaaaatttgaaaaatatatgttaacctctataaaagtaaaacatatttttgctgattcttatttgtaactttgttagacaattttctattatattgactaacacatttagttattttctctctctacatcctcaaacacattcacatgatatcaaaattcatcattgtttcattttttctctaatctcattaaaaagtgcgaaaaatttaactat

SEQ ID NO: 36226 - DNA, 216 bp, Glycine max
tatgccgtaacaaaacctaactactttggagctactccctgattaaatgctttgatgtttgaacttatttgaagtttggtaagtatcgactaagcatagaatctggacacagtcactactccacagttgggcgtttgcttgcaattgacactggtggcctttgtacctcagaggaagcataaaatggatgagcgttcataagaaacaaattgtctt

SEQ ID NO: 36227 - DNA, 427 bp, Glycine max
tcattgagaagcaagtgttacacccctccaatagctaagctcacccctatgccaaaatacatgaaggaagaaagcttccttgagaagctttcttgggaagcaagtgttacacccctccaatagctaagcttagccccatgggaacacatgcccctccaatagctaagctcccccccccccgccccccacaccaaaatacataaaaatacaaaaaaaaaaatcctactacaaagactactaataatgccctaaaatacaaggctaaaaccctatactactagggtacccttaacttgtacccttaatttgtagggtaccctacaaacctaaaatggccaaaatacaaggcccaaaagaaggaaaatctattctaatatttacaaagaaaagtgggttcatacttaacctatgggcccaaaatctaccc

SEQ ID NO: 36228 - DNA, 418 bp, Glycine max
  unsure at all n locations
aaaccatggaaggcaaaattggattggattatggcagatataaaattagttaaacaaacctgccaattaggggttntgcggatttttgcaaattcctcccttgtttctggatcaaggccatacttgactataggatcagatatttgctgaccttcattgtcagcaaagacaaattttgaagtcaatgaagacttaaatngcctccatcttgctgcaactgttgacatcaccttcttttttgcattctcaccttcagggatatcaaatntgcgctgcataacanaaggtgttatgtaacagtaggtaaatgaatcctttanaagtaacttaacaacaaaatcaagaatggaagtgtatttagaatgacttaccanaatatctttccatattaagctctttagatcgtcngngacaacat

SEQ ID NO: 36229 - DNA, 446 bp, Glycine max
taaccaattcaggataaataggcaattgtaatgacataaaatgattatgacctaagttctgaaaggcttgaatgcaatcaaaggtttcatcagaaaagaattccatatcaataaacttagggtcgataatggaacgagatgagaaaagattggagtaccgtttctgctgttcgtcggaagaaaacaatggggaagaggacaatgaggatggaattggtgctgtggatgcgctagtggctccggaacgatgagcacttgaagccgaagcggaggcggaagaaccctttcgtttctttgacgattctgccatttgaaggagtctttgcagatttcaatcggtgaaatcaaaagaaaaatgaaaaagaagaagattgcaatttacgggagttgatttgatgaagaaattagtaagatacgaaggtttggaggtttgggaatggaggaac

SEQ ID NO: 36230 - DNA, 361 bp, Glycine max
  unsure at all n locations
caagcttgttccattttcctgactcaccatanaccttgacccagggtgagaatgccaatccttaccctcggaagcanacaataggagagagagagagagagatgagaaggagaatttccgatcaaaggataaaggagaaggataatttccaatcaaaggataaaggaaaggaaattcccaatcaaagagtgggggaaagcacaaagataagaatgagaattcccaatcaaagaatgggagagagaacaaaagagagatgtaaaaaagaagatatctcctggtcagagataccagatgatatgtgccgagaggtccttggaccagacaatatctgaacaatacagaattgtcaccaaatgaa

SEQ ID NO: 36231 - DNA, 438 bp, Glycine max
  unsure at all n locations
ntctccactaagtagcctgatgcctgaaatgtcttttctgattgtgtggtcctagatgcagggaagattttctccaagaacaccctcttaaggtcatcccagctgaaaacggacctgggagcaaggtagtatatccaatcttttgtcactccctccagagaatgaggaaaagcctttagaaagatatgatcttcttggacatcaaggggcttcatggtggaacaaaaaatatggaactccttaagatgcttatgaggatcttcacctgcaagaccatgaaactttggcagcaaatgtattactccagtcttgagaacatatgaaacaccctcatcatgatattgaatgcacaagctttcataagtgaaatcaggtgtagccatctccctaagagtcctcttacgaggtggaggttgagccatgttctcagtatgaaaa

SEQ ID NO: 36232 - DNA, 435 bp, Glycine max
  unsure at all n locations
ngatctttttgtaacgacacgcacacgcaaagggagagagaagcaaagagcagaccccccacagcngccacnccgaacnagacacatactccccctatgggcaacagcaagaaatgcggcgcgcacaagaacgagaaccaccatccaacagagagggactcggcagacctcgaccatccaacgctcagaacgcgacgggcgaagtagacactccgacctagaaccctgataagaccacaaacagccggggcacacagaacaaaacagtcgacacgaggcacaaccacgaccgcggaccaacgtgaaaacaagccggaccaaaaagcagcagcgacgaaacaccgcgcggcaggaaactaaaggagggacccgcaaacactagcctgatagagaccagaccagcagaagcatggcacagacacgcgggaagccccg

SEQ ID NO: 36233 - DNA, 314 bp, Glycine max
ggagtgctcagggcgagggcagagaaccagaagagactctctcttcatgacacggtggagcaacacgaccgatggggcgctttatagcgcaacatacatcttctaaattcatcacgaaatgagaccgcgaataacacagcgacacccgagtgtgaagactaatattgccctagaccatgccgaactggcgcacatatatacaacagctcaaatgtggccttgtgctacataacaccatgcctcacacattcccgtatgaataaccgaacgatggatgatgcaatccatgctctggtgctgccttaactgatagc

SEQ ID NO: 36234 - DNA, 527 bp, Glycine max
  unsure at all n locations
nggcgttgtcattctttttagnacgncaannnacncagacacgcggagctctnagncgaccgcaggctggcagcangtatcttattctagaagnnnnaaacgncngagaggggcctagagaaacnggcaaccaacacccaaagccgggaanggagnacaacngggggggaancganaaccaacaggagaatncanacnncaagncggaagagacacaccgctgcagaaagaactgagcaancgagnacaacagccaggcaancgacaaccaaaaaggaatcancgaaaataactcccaagagtcacaactgtgcanattttatttgaatggtcatcagtggcctataaatcaattaccagacatgaaaattcaaatatcaagtctgaagagtcacaactctttagagactatttgtgtaatcgattcaccaattatgtaatcgattaccagtacggaattttcgaaaataactcacaagagtcacagctatgcaagaagttgtgaatggcatcactgcctataatcg

SEQ ID NO: 36235 - DNA, 362 bp, Glycine max
agtgtcggcttgtggggccacactggaatccgcttcaatggttcctctttctagaccacttcgcggggagctggttcgtagccaattctaggttgcctcctactagcacttctttaacgtcttgagccgaacgcgtgatgacttgtcggtcacgggcctagtacttttgcttaccttaggctttggacttggtcgcctgctggtcggccatgggtcgtaggcaacgctccagcctttgtagatgatctgaggggctttggaggtggtggcggtgtgtatgttgcccgctgccggtcataccctagctgctgaggtgtttcgccctgcgcctgtcttgtggcacagtactctctgatgaaagc

SEQ ID NO: 36236 - DNA, 408 bp, Glycine max
  unsure at all n locations
gtcgtcttcgcaagacacagacgatggcgtcatgtatatgggccatagccctagatcaccgctgtacagacagagccaacaacactacaatacagcatgcggtggctcatgtctaagcggaacaagaggccacatgaaagatcatgaactcatttcacatgatgcgaccatgctgacggagcggtctgtctcaccctgatctggacttgagatcttcacgattgcgtctaacggacacgagacgcnaacagcgatttctcacaatatagattctggacccccgctattgaacgtttggtcactcacgcgccactgaagtacatcaagatgctgaaaggcatacgaatgatagatgacctacctaatggtaatcaatagaccctggttaccaaagaactgacaatgacg

SEQ ID NO: 36237 - DNA, 195 bp, Glycine max
tgagctctatcacctgcactgtgctctctgatttcagacacatatcctgtctgaccctcgcctgacgagcagcctgtcttcatctacgtcactcgccttatcgaccaccacatggctggctgcgggccactctaatgtatttccatcaaaccgtgccagcaatcgcggcctgacaccaatatcttgaatgaccat

SEQ ID NO: 36238 - DNA, 434 bp, Glycine max
  unsure at all n locations
agcttctgttgtgacatcttgacttgcttcccaatctgacattcaccacagattctgcctttntctattttcagattgagaatgcctctaacagcacctttgtcaatgattntcttcatgcctcttaagtgcagatgtccaaatctttgatgccatattttgacttcatcttctttggaggatagacatgtggaggagtaactggtttcttgaggtgtccataggtaacagttgtcctttgatctgctgcccttcattagaacttcactcttctcatttgtcaccaagcattctgactntgtgaagtttacattgaatccttcatcacacaactgactgatgctgatcaagtntgcagtcagtcccttcaccagcagtactttgttcagactangaagtccatcatggactagctntcccattccagtgatctt

SEQ ID NO: 36239 - DNA, 458 bp, Glycine max
  unsure at all n locations
ttgagccaaaatcttgactcaccatagaccttgacccagggttataatgtcaatccttaccctcgaaagcaaaaaagaaaagaaggaaaatttccaatcaaagagaaagcaaaaagaaaagagggaaaatttacaatcaaagagaaagcaaaaagaaaagaaaattcccaatcaaagaatgggagaaagtaaaaaaggaagaagaagaaggaaagaaatctcctgatcaaggatcgaaagaaaacagaagaaatgtgcagaaaggtctttggaccggacaatatctgaacaatacagaattgtcaccaaaggaacgaaaagaaggaaaggaaaccatgacctanagtggtcatctccctttaattgccaaccaaaatcttgtgtgctagcgactttttcgccccgcactanaccaaaacagtaaaggaaataatccataaaagggcataaaaaaagaa

SEQ ID NO: 36240 - DNA, 390 bp, Glycine max
  unsure at all n locations
agcttgtatgatgcttcattggaggaaaagaaagagggagataaagatagaggtgggagcacgaaattgaaggaataanagagggagagaagtggaactttgatgaatgagagtgatgcaagctccattggagcttgtatgcctangatcttcttcatcagtggattcctttgcttcttggaagataaatggccgcggaatggagaaggaagagagagaggagacgccgcttcaatgagaagataagtctagaagaagctcaccaccatacgaggccatggataagagcttggaggacgaaagagatgaatgaagggaggtggagagaagagcacgatattctgtgctcagatagagctctgagatctaaagttaatattcanatgatca

SEQ ID NO: 36241 - DNA, 447 bp, Glycine max
  unsure at all n locations
cttcacctttggtcctcctcatagttgctgcatgatataacatgctctattttcatctcccactccaagtaggcctccagatcattctttcctttaaagggaggaatgttgagtttaataccatcaattcggctttgtctgggaacaccatcattccctcttctcctcctttcttcttcattatgatctctgttctccatttgatccaacctctcatggagcgcatcatctcgttgtttcattaacctctccaaatgttgcatcaaatcttgcatttggaattgtgaaagcccccctccatcattaggatttgtttctgccatctcaaacaaacaaatcaaatgtaacaagataattatatgtgttgttngaatacctcacccactcaagtgtatcacataattatgacttgtctcttatgaaacactcttgccttctaccactcta

SEQ ID NO: 36242 - DNA, 495 bp, Glycine max
  unsure at all n locations
cggcgcttttattttttagnctagccaatnncacacggacccgggatcctctgagncgacctgcggcangcaagcttatttttttaanaaaaagcnnnacaccaagggggggggagaggagaanacaacacaccccccccagaacggacaccnnggcccaccaccaagccagaaacaanaggagnagcaggcaagcgaaaccagaggaagccacnnccngcngaaaaagccnggcgaaacngcaccanaacaangcgaggaggaancactcgaancggngccganaaaaaaagccacaaagccgcaagaaggaacgcngcacnaacctcggagggggcgnacacgacagcgcagccgccacccaagggagccaaacgaacacgncgccaaaaggggggaacagacggcaaggcaacaacgcgggagcgaaaacaccaaagcgacaaacccgggaccagaagcaagggcgaccccaccagaccgaaccagaccgaa

SEQ ID NO: 36243 - DNA, 432 bp, Glycine max
  unsure at all n locations
ttagatactcagcttgatgtcttcaaacacaatatgtagacctaaatgaagatatacttgcattgnttatgtaattgtatgcattatgcgatataatttgttgtaacccattactaaccaattaatattatcaagtactcgtttggttaagcaaggaaattgttggtccaacaaaaatcatttacacgtgcagcatacatcattgtcataattgacaacacataatgacatgcatgcgtattacagtttgagcgcgacaacacattggctgacttgactacacattggcgacaatacattggttgacttgactacacatttacgcgtgtctatttttatgtaaacaaagttaaacaaatgctcggtcacaaccatctatatatatggcagactacgctactaaatcacatattatctagctttcaaataatc

SEQ ID NO: 36244 - DNA, 384 bp, Glycine max
  unsure at all n locations
acccatataatngctaagctcacccgctgccaaaatacatgaaaatataaaaaaagtacctactacaaagactacttataatgccctgatatacaaggctaanatcctatactactagaatggccaaaatacaatgcccataagaaagacnaacctattctaatgtttacaaagaaaagtggacccaaccttggcccatgggctcagaaatctatcctgaggttcatgaagaccccagggccttctttagcaactctagcccaatcctcctggagtcttctatccaataccgcttgggggtaggatngcatcatcccctccaccttgnnnaaggatttacctcanatcccgaggttttcatactctcaatccttcctcacacct

SEQ ID NO: 36245 - DNA, 429 bp, Glycine max
ttgcatgtttagaaagttctaaagagagaaaggtccatgtttcattgagttctaagagattttgctatgtgaagatctgcagagacgagagctcgaagcggaagctgttctgagagcttgagatgagtttgtgagtgattgtgagatcctagaggtgaaggagacatcctcaccacttgtatttttgcaatctttcatcttattcttctctatgttgtaaaggaggtttccagactatggaaagctaaatcctctgttggatcttccttataggtacttgatgtaaatatatttctatctatgtaatgatgttttgtgcattctctgtgctatctgcttttcattccagtatgcctttaccttgatcacgtagatgcatgctttgttagggtcattcaacagggaaactggtttgattctaaagtcctt

SEQ ID NO: 36246 - DNA, 440 bp, Glycine max
  unsure at all n locations
agctttgattaaaacaattatctaatcattacaatgcattcaaattatacaatagctcattcaaatcattcgtagacactcatttcatacaaaacaatccactgcatatcattttcaaccaattcactgttcaagcaagctttttgtacaagcaatcaactcaaagtactgaaatttaaagaactaaaacatanacactanaatttaaatgaatgaacatcaatcataaaataaatgaaaataactaanatgttcanaatgcacaaatttaaatgtcctgctcctgtggttgctcatgtgcatgctcattgagatccaacacctgagtagctggtgaatcctgagggataggctgctctagctcagatgctagtgcanatggtatgacatcatcangtatgggtactgaggatggctctgggatctggtctctggaagtc

SEQ ID NO: 36247 - DNA, 425 bp, Glycine max
tgaataccctgtatctaacctttattcaatcttgttccttttagaccaaggatttcagtaacctcattggagaagaaacctaacttcccaatgggtcagtgttcaatggtagtatgatcagttaagcctgttcctcgataacttaaatacatctccagctcaaattgatgaaaaaccaagcatgacaaagaccatagacattaaggggggaaaacagaaaaggctgagaagttaaacactactgcaacaaagagcattggcagttacaggtatgggatggatagtccaaacaatagcagactatagtataattggcttttctaactagctcaatctctctcattttgaagatattaagctagggaattcaataccaaaaatatttcagtgtccagtgaatagacattttctcttaacacatcatg

SEQ ID NO: 36248 - DNA, 440 bp, Glycine max
  unsure at all n locations
agttatcataacttcgganacanaactnnngggcgctgcgagtggaaatnctatagagaacaaacgcgtgctatcttttcttccttctctctcttgccaaaagattaaaatgactaaccgcctgagaattctgttgattcttccttctccctcttgccagaagaattccaggactaaccgtctgagaattcttttgattcttcctcttccctttgaacaaaagatttcaaaggactaaccgcctgagatatcttttgttgcccattacaaagattcaagggactaaccgcctaagaattctttgtcttaacacattggagcgtacatcctttgctgtacaagtagagcgtacatctacttgngttgtaatacagagaataagagacggtacatctcttgtggtcagttcaagggagtgacatccactgggttcaagagac

SEQ ID NO: 36249 - DNA, 421 bp, Glycine max
gtcatcaagaagtactacgcccacaggcaggcgcatggcgtaacaccacaacagcctggggatggccagcaacatgcaacaaatgcaccgtcgccacctccagagcccctcagctcatccataaaaaggttagagtattgcctacgacacatggccgaccaataggcgaccaagtccaaagccaaaggtaagcaaagtactaggtccgtgaccgacaagtcatcaggcgtccagctcaagacgttaaagaagcgctactaggaggcaaccttgtaacttttaaatttctgcttgttatttgatcaccttttgtttctcaagtcatagtaggacacacctagttgctcatgatcctaggaatttaaataaaacgagcacaagctcgggaggtagtcatacctcacaaaatatatatatgtat

SEQ ID NO: 36250 - DNA, 526 bp, Glycine max
  unsure at all n locations
aaaanattgtaggtacgtanctcgggcgaattcagctcgnaccccgaggatctntagaagcgaactggcagcgtgccagctcttctatantattctatatgtgcccggaanggcccacgatgnggttcgagcgcatttattctcggtttggttaccttttataccccctcttgacgtgcctaagccggtttacctaagacggttctcgcctaacctaaaaataaaataaatttccacccgaccgttggaatggttattccattacctccggttaaattaaattccaaccgtccggcggggccggaccaccgttggaattaaaaaaagaaggtgaaaattatattattattcaaaaatattctttttagtaaattaaagcggaaaatcaatcgggacgtttctcttttgggattctcattcttaatcgagatgataataactaggtgagactanggctaaatcactcgctagtcagctcgtcacaaaaattgctnttgaggttgcatttcatttctactaagtaaag

SEQ ID NO: 36251 - DNA, 445 bp, Glycine max
ctggcattggaattgcgaaagccccactccatcattaggattatttcctgacatctcaaacaaacaaatcaaacgtaacatgacaattatagttgctgtttgaatacctcacccactcaagtgtatcacacaattatggcttttctctaatgaaacactcttgccttttaccactctaattccccttgagttcttaggcaattcaagagattatggccacaacaaagaacaattcaccaatatgtgtaaggtaaggctagacaaggaaaaggttaaccaagaaaaaggctaacaatgtttttaggcacaaatgaaggaaacaaaattcagaatttaggaattcaagtaacaatccttcatgcaaccaatatattaccttaaagagtttttttttttaagttcttcaagcatgaaccattcagcccaatttttttttttttttaat

SEQ ID NO: 36252 - DNA, 357 bp, Glycine max
  unsure at all n locations
ctttccttccttctctctcttgccaaaagataaaaatgactaaccgcctgagatttcttttgattcttccttctccctcttgccagaagaattcanaggactaaccgtctgagaattcttttgattcttcctcttccctttgaacaaaagatttcaaaggactaaccgcctgagatatcttttgtttcccattacaaagattcaagggactaaccgcctaagaattctntgtcttaacacattggagcgtacatcctttgcggtacaagtagagcgtacatctacttgngttgtaatacagagaataagagagggtacatctcttgtggatcagttcaagtggagtgtacatccact

SEQ ID NO: 36253 - DNA, 449 bp, Glycine max
  unsure at all n locations
ntcatcaagaagtactacgnccccaggcaggcgcagggcgtaatacctcaacagcctgnggatggccagcaacaggcaacaaatgcaccgtcgccacctccagagcccctcagctcatccataaaaaggttagagtattgcctacgacacatggccgaccaataggcgaccaagtccaaagccaaaggtaagcaaagtactaggtccgtgaccgacaagtcatcaggcgtccagctcaagacgttaaagaagcgctactaggaggcaaccttgtaacttttaaatttctgcttgttatttgatcaccttttgtttctcaagtcatagtaggacacacctagttgctcatgatcctaggaatttaaataaaacgagcacaagctcgggaggtagtcatacctcacaaaatatatatatgtatgtttaggtagaaagataccttcgatatg

SEQ ID NO: 36254 - DNA, 457 bp, Glycine max
  unsure at all n locations
ggctggcattttttgtacatttaaaaaattggattccaggcacataaagaagaatatgagaaggtgaaatcaattcgaaaataagagacattaaaaaatggatttcaagaacataaacaataatcaatatgagaacatgaaatcagttgactctacaacccctcttttcaatttgcaacacttccaaaatctcctattttgattatcagtcgtgtttgcaatgtaaaggctaagggtgggtaagcgggctggcccaccccatgtaaggcccgcccacataagcctgcattggcagcggactgggccaatccgcccccgcttcttacacggaccanataaattggccatccctgccccgcggaccccgcgagtcanacgggccggtccgcgggcctagctntanagaatntcaantttaataaaaatacaatataatcaaattanattcaatacaaat

SEQ ID NO: 36255 - DNA, 439 bp, Glycine max
taagaggccatggagattgagatggagacagacacgtgtggtttatagatttcacctgtattagttttctcaaacattatctttgcccccaattacatgattagatagccttgtgacaatcaagggagtaccattacataaaccttcaatttgatctaaattccttaaaagcatcattggtgtgccaatcttcaatttgattttatgatttggaaggccgatgttccaagagaatttgaaaattcaagggttaaagcctcgaatatttggtcttcatttgattataaattgtcaaaagaatctaagcttagatattgtttttcaactataacataattgtaaacaatttaactaatttgattgtttcaaatgaaagatatttgtgtaactttttcaaatggtagatgagattacatcgatttaaagataatacatattc

SEQ ID NO: 36256 - DNA, 179 bp, Glycine max
  unsure at all n locations
agcattaatattataataatcaccttcanaaaattgacaaacataatttaaaagaaatataataataaccataatattaattaacaatcataatttgtttatcacaatagagattatccanaatagacattctatcaatntagctaagtaaacattgtatcagtgtaccaatcattaca

SEQ ID NO: 36257 - DNA, 441 bp, Glycine max
  unsure at all n locations
tgaccaatcccgacccaacccggtcgtagtcggncagtgagcatcctgtgatgtacctaagcaggcgagctcgtggcagtctacagataaaatgaaaacaagaccacaaagcaaggaggcttgtggtggctggccagctgtgaattttgtgtaatatgtgagatatggcctctggtaatcgattaccaagggtgggtaatcgattacaaggcttagaaatgaatacaggaggctaagatggtctctggtaatcgattaccaagggatgtaatcgattaccaggcttgataacgaggtcaggaagctaaagaagcctctggtaatcgattaccaagtggtgtaatcgattaccaagcttcaaaagggaactgggagttgatggaagcctctggtaatcgattaccacactgtgtaatcgactactcataggaatgtgtcact

SEQ ID NO: 36258 - DNA, 472 bp, Glycine max
  unsure at all n locations
aagcttncgtattggttagnattanntacccanaccaccaaatatttggtcgtggtaggacaccagaaagcaataacgttgccaattgttgccctgnaagacagaagaacatttagtaggttaccgcaaattattaatgcananatatttgaacattttgttcaacattcaaatctcacgttatttgattgcatataaaagctcctaagtacactgtttcgttgngattccttgacccatgtttgaatgtaatgttgacattcttggcatctatcctttgagtggtgatagactgangtcaaggaaaccatacagtgtccataacctaatcttgtgttcaatcattcataaactattcaaacatttgcataaatttgtaatggttattgtacgacattaatatcagtaatagattagcactctaaccaattactacatcgaccacatgagatggtatgttcaacattgccct

SEQ ID NO: 36259 - DNA, 451 bp, Glycine max
gattgccttaagagcaaaaaagagagaagtgaacttcttctctgcgttttttctggaaaatgcgatgaattcgctaagcgtgcatgttgcattaagcgagttcatcaatattgcttgaatatatgcattttcagacgaactcgctaagcgcgcctacgacgctaagcgagttcatcttttgtggatgaacattcatctccctgatgagttgactgtggctaagcggggctgattcactaaggccaggtaacttagtcaaatttttgttgaacgctgcgcgctaagcccaacctatctaggctaagctcattgcattgcggcagccattgtgctaagcgagcctagcttgctaagcccacatacttagtgaaatttctaaaatttatgggcccgctaagcgcagccttgctaagcttagcgcatatctgttgcggctatcattaggcttagc

SEQ ID NO: 36260 - DNA, 341 bp, Glycine max
  unsure at all n locations
agctnatagccaattcanacgacanataacttttacgcgaatgtctgattgagtcctgtaatataacgagacgctcgaaattgaatgttgaacctctgagccaattcaaacgacaataaccttttacacggatgtctgattgagtcccgtcatatatcgagacgctcgaaattgaaagttgaatctctgagccaatccaaacgacaataactntntactcggatgtctgattgagtcccgtaatataacgagacgctcaaaattgaatgttgaagctctgagccaattcaaacgacaataactntntacacggatgtctgattgagacccgcatatatcga

SEQ ID NO: 36261 - DNA, 466 bp, Glycine max
taaatattcaatttcgagcgtctcgatatattacgagtctcattcaaacatccgagaaaaaagttattgtcgtttgaatttgctcagaggttcaacattcaatttcgagcgtctcgttatattacaggactcaatcagacatccgagtaaaaagttattgtcgtttgaattggctcagagcttcaacattcaatttcgagcgtctcgatatatgacaggacgcaatcagacatccgtgtaaaaagttattgtcgtttgaattagctcagaggttctacattcaatttcgagcgtctcattatattacaggactcaatgagacatctgactaaaacgttattgtcgtttgaattggctcagagcttcaacattcaatttcgagcgtctcgatatatgacatgactcaatcagacatccgagtaataagttattgtcgtttgaattggctcagaggttcaacattcaa

SEQ ID NO: 36262 - DNA, 407 bp, Glycine max
  unsure at all n locations
agctnagattgctctattcaatggagtngacaagaatatcttcagactgatcaacacttgcacagtggccaaggatgcgtgggagatcctgaaaaccactcatgaaggaacctccaaggtaaagatgtccagactgcaactattggctacaaaattcgaaaatctgaagatgaaggaggaagaatgtattcatgacttccacatgaacattcttgaaattgccaatgcttgcactgccttgngagagaagatgacagatgaaaagctggtgagaaagatcctcagatccttgcctaagagatttgacatganagtcactgcaatagaggaggcccaagacatttgcaacatgagagtggatgaactcattggttcccttcaaacctttgagctaggactctcggata

SEQ ID NO: 36263 - DNA, 462 bp, Glycine max
  unsure at all n locations
tctcnncctatttgctataaatagggggagaagtgaagaagtataggttcagcccctttggcacttctctctctctcgaaattgctcaagaaaattatttccgtgaagaaaatccaagccgaggcgcttccgtaacgtttccatgagtaattacgtgaagattctcgaccgttcttcaagattcatcgttcgttcttcgttttcttcagtcttcaacgggtaagtacctcaaaccaaacttttcaatttattctatgtacccgtggtggtccacattatgtttcgtgtatttttattcttgttttcatttgctttttatacacccttttgacgtgcttaagccatttatttaattcatttctcgcttaatctaaaaataaaataaattcccaccgatcatttaaattgtatcatccgttaattccgaccgttcggccgtgccgtaaccacgttggaaatcaa

SEQ ID NO: 36264 - DNA, 444 bp, Glycine max
  unsure at all n locations
agcttgaatggacacctacanttcctagncctagggtggcttataacgaattctttgttcctacacctatactcgccactcctttcacacccaattaacacaaacgaagtccttcctctactacatgtgtatgtgtctgaccttacaatcaccgccacaaatccattttcataagcaacggatcaagcccatcgcagaacatcctcttggctgtcaaacacctacaaaccaatccacataatttcagcttcctacgacatattcattctattaaatcactcacagtcatgaacattattacctgagaagtattgaacacatctgaacaatcaacatgtggttcaattacaccacattcttcttcattgtcataatccatatccattgttgcatgcattataccttcatatatccactgatcctggtctatcttaacaataaata

SEQ ID NO: 36265 - DNA, 461 bp, Glycine max
  unsure at all n locations
nttgcaagttggaatcatttatcctatctccgacttccaattggtgagtcccgtccaggtagttacgaagaaaaccggcctcgccgtgataaaatatgagaaggatgagttgattcctactcgggtgtagaacagttggagagtatgcaacgactataggaggctgaaccaggttaccaaaaaggaccattttccactgtcattcattgaccagatgcttgaaagcctggcaggtaaatctcactactgtttccttgatggtttttctggttatatgcaaatcactattgcttctgaggatcaggaaaagaccacattcaccttccccttcggcacttttgcctataggaggatgcctttcgacttgtgcaatgcccctggtaccttccagcagtgcatgattatgtattttagtgattttttagaaaattgcatagaggtgttcatggatgatttcacta

SEQ ID NO: 36266 - DNA, 661 bp, Glycine max
  unsure at all n locations
aggggtatagttcngatgcatagtagctacaccgcgaattcgagctcggnaccccgggggatcctctangagtcgaccctgcatggccatgcanagccttcnatttttttagangcaatnncntngggnnggagcaagcctccgttctgtctcttgagcattaattcncctaaagtaggatgcgtagcccctccccttactcctctntcttcctgttgcacctcgcgcatgcattctcacatgngatgaaaaaaaatcacgcaattgaagcgactctcatgntgaagcatcanaagaatcccagccctcncattagatagcctcctacaagtagagccttcccatcatagtgcgtactcagaagcacagagaagccttcagagtagaggtgcatctcttannacactcacattagatattttatatcttttacccttctacttcccagttgctaggtactatcagttatctctcccatagtatctccctcaccatgtacttgttctacaatgcttgttaaccatgaattctcttagaagtattccaccctatntaaagcttgctattaaanagcctagacttcgatnactataatggtccaaagtatcttgctcttgttacttgaacacatgaatagtgtagagtttacgttcctttgacg

SEQ ID NO: 36267 - DNA, 428 bp, Glycine max
tctcaaggaggtgagcttagttatgagaggggtgtgtgtctcttatctctagcttctcaaggaagtttgctcaaataagcttctcaaggaagttttctcaaagaagcttctcaaggaagttttctcaagaaagcttctcaaggaagctacctagtctataaatagaagcatgtgtaacacttgttgtaactttgatgaatgagagtcttgtgagacacaactcaaagttcaacttctctccctttttcttccttcaatttcgtgctccccactctctctttctctccctctttcttttcctccattgaagcatcctctccaagcttcttatccaaggctcatcttggtggtgaagctccttcttccatggcttattccctagtggatggcgcctcctctcacctattctgctttgtcttccgctgcat

SEQ ID NO: 36268 - DNA, 310 bp, Glycine max
cctaggaaattcataaattattgactgcccacacctactgtctcgtggggggtatgaactgcttgacaagaaacttatggaggagaagaccaagcgtggacatgaggaacatcagtttactgaaaacccaacactcaacatcgaccctccatcccctatggcaagacacttgaagtggaagatcgcacgcacaaagagttatgaccaaatgacgtctgaagcggcacaagaaattgtagacaaaattgtgagttcatgtcttctttggttactgtcattgccaaataatggttagccaacatagtcaaat

SEQ ID NO: 36269 - DNA, 433 bp, Glycine max
  unsure at all n locations
ntttgaaagaatggaggagaggaagaaaatagaatagcactcgtctttgcccgctgaaattttctggacagagcatatgttgaacaaaaactcttagaaagatattgagaaattggttgttttaaattcatgccatgatcacatatttatagccatttgatggctcctgaagaagccatgttaaaagttgtgacttttggcaatttcttcaaaaccagttagttactttaaaaagttgtgacttgacaattttttcaaaaccagtcactttaaaagttgtgactcttgacaatttcttcaaaatcagtcactggtaatcgattaccataatggtgtaatcgattacacagtttattttatcaaaagttgtgactcttcatgttgaggtttgaaatccaacgctcaaaaaccattagtaatctattacaaatat

SEQ ID NO: 36270 - DNA, 436 bp, Glycine max
  unsure at all n locations
atctttatgatatctcaagaaccgtgggttgctgggggactgtatgtangcatangttgtgaccgaactagtataaatcttgtgtttgctttcttcttcctacaatcttattttacgctgtacatttttttatttctgctttactttaggttaagttatagtttctgttctttactttcttataacttagtagtaaagcctaattgaatctagtaacattaagaaagataaaattttaattagtcaagacacgttcataattaattcaacccccctcttcttaattattctgaggccactcgatccaacatgatctnntatttggagaannnattatgtgttgtatttgcaacttgcaaggtactgctttgtaaatcagttngaanagaatattggctactggtaatntgatactgccctctggtaattgattacc

SEQ ID NO: 36271 - DNA, 422 bp, Glycine max
  unsure at all n locations
gtgtctaacacatcctttntagtttcttgcagactcagattatctatgttatatttacccaccaaattcctgatagaagcccatttaaggcctctacccagccccctaatgttataggacaagatattcatctctgaatatatctgtttcccatctttaaagcttctttcctgtcccgagactccatagctgagaaagagtgtataccttcagaatctgatacatggttcaggcccatggactgcgcaagaacccattgctggttggcctcttcgcagtcttcaaactgatttccttctttgttaatagtcccctcaacaacctgtaacttagtagtatttgggccttcagaagaagcatcatataaaccacccataatcttatcctccttggagctattagcttgttcaggttccagctca

SEQ ID NO: 36272 - DNA, 335 bp, Glycine max
  unsure at all n locations
tgtcttttcttaaaganagattaacaatttccagttnttctgccttggataagtctgggacctcaatcaagtctttggagccctgaaggccaattatctttaaattcacaagattctgtgacaagaaagatgcatcacattgttcagaaacggtgaaattcataatcatgagccttaacaaaaagagaaacctgagcatacatagaagcacaatatccaaggtgtggctcatgtgaatgagtttcacttgaggctgtgcaggactagttacaacttactactctctcatgtatctntacaagttgaatgaaaaatatagtacgtattcatacctg

SEQ ID NO: 36273 - DNA, 430 bp, Glycine max
  unsure at all n locations
ntgacctatgcgnccaaaaaaatttcagattgcattgacttatctagatcgcacaaattcaaacttgagtgttgttcacacgtcaattcatcattaacatccttgtccaatgtctcaaaaaaagaaacaatccatattgcaccaactaaatcaacaatgcagataacatcgattgttcacacgacaatgaatcattacgtcctctattgaagtgtaagttatttattaaaagctctcatagaaaaaaatgggttatttaaaaaacataaaaaaatcacatttttaaggtgtatttttcaaaaaatcacaacgaaattgtatttttgtatggtatttctagaaactacataacgaaaatgaaactttgttgtgtaattntgaaaaaatatcctacaaaaacttgttntcattntgttttttttcctcaacg

SEQ ID NO: 36274 - DNA, 302 bp, Glycine max
  unsure at all n locations
attgaaaaaggatgtcgtggttgaaagttggtgtgaacctgatcccgttgttttgagaggtgtgtcgtcgtagtgtttcactgagcctangtttcatctaagccctacatgctagttactcacaccatcttcctaggttttggatactatggtttcgaaagcggagaggttttcggatttgttgagcaaatntgcgcagagttccaaggaggttagatgttntgggtntgtatttgtgatcagagaaaggatgttttaggtgtgggtcgttgtttgatggtggtggtgcatggagaggttgc

SEQ ID NO: 36275 - DNA, 449 bp, Glycine max
  unsure at all n locations
ggataaaatngaagctatttccttaatctcgcaggctttggtttgctctttaatttcctttcaacttacgtgctacccagttaaataaacagtatgtaactataactaatttacagtagctgctttgtttatgtaatacataacaataaaaataagcagctttgtctatgtcatatatgtaaaataaattaataataaaatttctattagtacctataacaagtgtggcgttcctcatgatttttataattatgatttgatgtatagaatttcatatatagaatggttatgaaaataatatacatggagagaaagtaattttaattgaatataattagaataaattattaaaatattagacatatatacttggtttcaaatttattttaaaaataaaataattggtatttatatacacacatgtacgtgcaccagaaacaaattaatat

SEQ ID NO: 36276 - DNA, 378 bp, Glycine max
  unsure at all n locations
caattttattaatcctactttgatgaataggaagcctggggaaaatggagagaataagaagaaaggagaaacacatgttgtgactaccattcctacatggctaaatttcccattagcccaacaatatcaatactcagccaatatcagtccttctcattacccaccaccctaacagccaagaatgcccaatcatccataaaggccacccncaaatcggccacaaaatccacccgatgcacacccaagaccaaacaccacccctaataccaatcaaaacaccaaccagggaaggaattttctagaaaagaagcctatagaattcaccccaattccaataccatatgctgacttactcccctatctgctcgataatgcaat

SEQ ID NO: 36277 - DNA, 448 bp, Glycine max
  unsure at all n locations
tatcttaacacaaaaatgacatgttaatccctccgatttagatcaatctcatgcacacttttaatgtaaaatatttatgcacatgcgtatgtgtagaatatcctactatttatgtcaacgtacaaggacatccaacacattctaattgccatacatatatatgcatttgaaaagaacacacattctcatgctcaaggcattgcgtcaaaatttacacctaatcacaacctaaacatttgctatcacaaactacctacacatatttgaaacatatatcatacaaacttttattgtttcactcacatttatttatatgcatgttggaaagctaattacgtcatgcacacacttgcattcaaaagggaattccatgccatcatatattcatttaggaagcgacctcaatattcatttaggaagatactcgttcacactntgcaaggaattt

SEQ ID NO: 36278 - DNA, 249 bp, Glycine max
tacttgctctatcactgaggattttatctaagaaataagtatgcaaagaggcattcattttgttgggtggcatcaaataactttcccccaaaagctatggttgcctcaatgtttttacttgcggaaatgaatattgcaatgcaagactcattggaatcgcaacacagtatatcaaaactctatgtccaaatccttctcaaggaatatggtgatgtctctttttgagtcataccagccaaggatcaacaa

SEQ ID NO: 36279 - DNA, 441 bp, Glycine max
  unsure at all n locations
ttaggcttaatttcaaatgagtctaaaggccgaaaattcctacattacctatacanaacaagggccgagggagctcttaaagccnattcttaaaaggcccaagataacacaaagactctataaaatgacacctaaaataaaagtccactaatgattccacacacatgattatgaaaaaggttcatcatacggaccaaatgcaaaaagtggtcaaattaccaaaatacccaacaaaagcctattctaattttggtttacattatgccactttaattcctagacatatactccatgctctccaagtgcatcggtcttcctttacatgcctcttggatattgacttagttaatggtcccaaacccttcccttcaagtactacatcttggtctttaaggtcatccataagtggatctacaacattacttaatttatttttcctat

SEQ ID NO: 36280 - DNA, 93 bp, Glycine max
tgtgatcattagcaacattgagtggattgttcctaagatcttttgacaacatttaaaaaatgttgccaaatatgaataaatgttactaatatg

SEQ ID NO: 36281 - DNA, 444 bp, Glycine max
taggagaatgaaacccgaaatgtcactaagaatcaaggtatgatgcgaaaaagcagttcaacgctggtttcttggcggtatctcgataccctgagtgggtggccaacattgtgtcggtccctaagaaggatgggaaggtatgaatatgtgtggattatcgggacctaaatcaagccagtcccaaagacaatttccctctacggaacatcgatgtcctcgtagataacacgaccaattttgctttgttctccatcatggacggtttctcaggctacaatcaaataaaaatggtactagaggatatggaaaagaccatgttcgtcaccctgtggggaacgctctgctataaggtgatgtcttttgggctaaaaaacgctggggcaacctatcaacgggctatggtggctttgttccacgacatgatgcaccgagagatcgaagtct

SEQ ID NO: 36282 - DNA, 416 bp, Glycine max
  unsure at all n locations
agctagattggttttgtgatagnngatttgcaggagatgttgatgatagaaaaagtactaccggatttatgttttttatgggtgattgtgtttttacatggagttctaagaagcaagccattgtgacactttctacttgtgaagccgagtatgtagctgcaacttcttgcacatgtcatgcaatttggctaagaagatngttgaaggaacttcacttgttgcanaaggaaaacacaaagatctatgttgataatagatctgcacaagagcttgccaagaatccggtgttccatgaacgaagtaagcatatagatacaaggtatcatttcattagagagtgcattgccaagaaagaagtagaattgactcatgtgaagactcaagatcaagttgtggatattntcaccaagcctctc

SEQ ID NO: 36283 - DNA, 436 bp, Glycine max
  unsure at all n locations
tctagccaaatggacttaccttgaattaattcctttgatagctcntntgatccttgtttccctttccttgttttgaagctcactacaagccttaagtgaaaaaccatgatattaccatatccttaaggaattttggagctttggaattgttttgggaataagtgtgggggggtttttgtttcattggacaacttgttttgttggctatgcttcatgatgtattttgggccatacttgatgtacattgtatattggttaaatgttgggcttaatccggattttggttgtggacttgaagagggcaaataaagcagcgcttagcttaattaatttctaattaggaaacttcgcaattttattttatgttgttcaatgtttatttcgttctgggccaaagtattggaatatggcccagtgactctgagtgactctttat

SEQ ID NO: 36284 - DNA, 451 bp, Glycine max
  unsure at all n locations
agcttgcctgnctgtgcagcagtaatgatggcccgagtgatgttgtggaacggttacgaacccggaatgggtttaggcaaagacaacggcggcataactagcctgataaatgccanaggaaatcgtgagaagtatggtttaagctataagcccactcaggcggatatgaagagaagcatcgcgggaaggaagagcggtggtcaaagctcgtgttggagacaagaaagtgaaggaagcccgccctgccacataagtagaagctttataagcgcgggtctgggagacaaaggtcaagtggtcgtgatatgcgaagatgatgttccgagtacattggaattggtacgaccatgccctcctgatttccagttgggatattggcgagtggaggaacgcnnctgcatttacgcaacgagcataatgtanacccttacggttntaaaagctctatagt

SEQ ID NO: 36285 - DNA, 459 bp, Glycine max
  unsure at all n locations
ntactgcttatagcgtntgttgctgttttccatgttatacttatcagtgagcacattggagtagattggcacttttgtcatactgaagatcctatttagagacatcaatactaattgtcaattcaaatgatcaaccagtaggttttttttaccaaattatttagaggtcgtttgataagtttcctttattacaagtttgactcataggaattgtatgctctaccttgaagaggagtgctagggacatgaatgcgcaaacaaggtgattggaagcactagtgaggagtgcagattgcattttttttgtaaccctgtgaaaaagggtaaagggagactaagaagtacacgatgaaattattaagagggatgaatggagggaaacacaacaataggtggaagtgctggtgggtagctttaacgtcgacaatttggcagcatatgaataagatccttttctca

SEQ ID NO: 36286 - DNA, 448 bp, Glycine max
  unsure at all n locations
agctttatttatttagtctaaacttacgagggatcgaggtttagtactttaggctacaacatagaacacaagaacatgattaattagagaaatatcctcatatgcattaacttgtttgttagaaagacccaatactttttacctattgctgtcaacttttacttacttgcatttattgttntgaccatagaattagtttatttatgttcttaactatcaattatcaatgtttgctccaaatttcagggcatcataagctcgtttagagagaagattgtctcttacgcgcttagtgcaagaatggtgctaagccaaatntcacttgtgctaagtgcgaaaatggcgctaagcgcaccttcgcgggacaaaaggcccctttaagcctgaattgtagagaatgaaagagaggtctgagtagactatgtgagcctagtgttgaacgaagaac

SEQ ID NO: 36287 - DNA, 461 bp, Glycine max
  unsure at all n locations
tctatagaaggttcattcctaatttctctacaattgcatcactgctcaatgagctggtgaagaaaaatgtggcatttacctgaggtgaaaaacaagagcaagcctttgctttgctcaaagaaaagcttactaaggcacctgttctagctcttcctgacttttctaaaacttttaagctagaatgtgatgcctctggagtgggagttagagttgtattgttacaaggtgggcaccctattgcttattttagtgaaaaacttcatagtgccaccctcaactaccccacctatgataaagagctttatgccttaataagagcccctcaaacttgggaacatttccttgttngcaaggaatntgtcattcatagtgatcaccaatcacttaagtacattagagggaaaagcaagttaaacaaaaggcatgcaaaatgggtagagtacctagagcaatctccatat

SEQ ID NO: 36288 - DNA, 432 bp, Glycine max
  unsure at all n locations
agcttaangtaananagtananggacctcgaccagnggagagtttgtttagagactaaacatgaaatttcaaaacagtttagagggctcttgctctctcatctagggtccattcctctntangtttgcctattaccagtcaactctcagttgtttntgttgttttgtaaggaccaatctctatgatgtcccacaaagaanaaaacatcttgtgattccaagaacaacatcattctacctttatagtagtaaaattcttgtacatcatagcctcaaggtcagttggttgaagccccttcaggtatgactatagttggaacttgttcaaaatcgttctctcacgctatcangtatgnttaaccctnaaagatatgctttgataccaattgaaatgacaaanataccataagaagggggttgattgtgtcttcac

SEQ ID NO: 36289 - DNA, 426 bp, Glycine max
gtagcctgatcgctaagcgacagcttatccggggctaagcttgacttattgtcgccaagcgcaattccgtacagccataactgaggtcgatgaagctaagcgccagtcatggcagctaagcaagattcattgcgacaatatgagcgctaagcgagtccttctcagctaagcgcatgctcctctgtacttaagatgcatcattttagctaagttggccagagcttggcttagcgagagttgtagcttttctaatctgcagacctcgctaagcggatgtaccctcgcgctaagccaagtttttgttaaaaaaaaactgattttgaattcgaaacgccggctaagcgcacgggtccgctaaacgagccttgttgagaaaccaaacgtctctcttgcttgcttagcgtagcggtccactaagcgagagta

SEQ ID NO: 36290 - DNA, 445 bp, Glycine max
  unsure at all n locations
agcttctctcttattntgctataaataggcggagaagtgaagaagaaaagggttcagccccttaggcacttctctctctctcgaaatagctgaggaaaattagttccgtgaagaaaatccaggccgaggcgcttccgtaccgtttccgtgagtaattacgcgaagattctcgaccgttcttcanagattcatcgttcgttcttcgttntcttcagtcttcaacaggtaagtacctcanaccaagcttttcaattcattctatgtacccgtggtggtccacantttgtttcatgtattttcattctcgttttcatatactttttatacccncctttgacgtgctaaagccantttattaagtcatttctcgcctaatctaaaaataaaataaatntccaccgatcgtttgaattgatcatccgttactttcgtttgaaatgaattc

SEQ ID NO: 36291 - DNA, 426 bp, Glycine max
  unsure at all n locations
tgttatccaaggctcatcttggtggtgaagctccttctttttggcttattccttaatggatgacgcctcctctcacctcctttcctttgtcttccgctgcatctccatggtggaaaatcaccattaaaggaccccattgaagctcaaagatccaacctccatagaagccccacaagcaagcttccatcaagtggtaatcagagcacaagagcttcaagtaggtgctccttaaacctccattaattttttttctttaccttctgttccatttttgtttcttcatttttctccatatatctcctcacatgtcttgttctaaatgttgttaacatgattctttagagtttccaccgattaaacttgctatagaagttagatttgattntctatggttcaaatttcttgttcttgttcttgaaccatgaa

SEQ ID NO: 36292 - DNA, 301 bp, Glycine max
agcttgcttcattatgtccaggaaggacaaggcagcagatggaactacttccgcttccgagtatgatagtcaccgctgtatgagcgcggtacaccaacaacgcttcgaagccatcaaggagtggtcgtttctgcgggagcgacacgtccatctcatggacgacgagtatactgatcttcaggaggatatacggcgccggcggtgggcaccactggttactcccatggccaagtttgatccagaaatagtccttgagttctatgccaatgcttggccaacacaggagggcgtgcgtgacatg

SEQ ID NO: 36293 - DNA, 414 bp, Glycine max
gtgaatgctctattcaatggagtggacaagaatattttcttactgatcaacacatgcacaatggccaatgatgcatgggagatcctgaaaaccactcatgaccgaaccttcaaagtgaatatgtccaaatagcaactattggccacaaaaaccgaaaatctgaatatgaaggaggaacagtgtattcatgactctcacatgaacattcttgaaaatgccaatgcttgcactgccttgggagaaaggatgacagatgaaaagctggtgagaaagatcctcatatccttgcctaagagatatgacatgaaagtcactgcaattgaggaagcccataacatttgcaacatgagagtagatgaactcattggttcccttcagacctttgagctaagactctcggatatgactgaaaag

SEQ ID NO: 36294 - DNA, 395 bp, Glycine max
agcttgaatttgaacaacggaagctctcgagaaaatcgagtggtcataaattttcacacagatgtccgattcggggaaataatatatcgagacgcacgaaattgaacaacggaagctctcgagaaatatgaatggtcataacatttcactcggatgttcgatccggggacataatttatcgagacgctcgaaattgaacaaccgaagctctcgacaaattagaatggtcgtaacttttcacgcgaatgttcgattcggggacataactcatctagacgctcgaaattgaacaacggaagctctcgagaaatttgaatggtcataagttttcacacggatgtccgattcgggaacataatatatcaagacaatcgaaattgaacaacggaagctct

SEQ ID NO: 36295 - DNA, 427 bp, Glycine max
tctatataagctgaaccattttatcaataaacacaagttgttttttattcagaaaattagagtttatctcttttatcttagtgagagtgattctcctaaattcttgagtgattcaagaacaccctggctgtatcaaaggacattcacaacctttgcgtgttgccctcgctggaaagagtgattctttccttcctttcatcttcacccttgttctttcaaaccacaattccagaaaatccacctctgcccagaattatctcgtggccataactcccattttacgcactcaaattaagtgattcttgagcctaaattgaatttcaaaacgagtcctttcacctcgttttggaatcacctcatttggagccctttagcttcagttatttccatttctatatttctgtccagccaccacttaacctacgtt

SEQ ID NO: 36296 - DNA, 421 bp, Glycine max
  unsure at all n locations
nagccttattcatcttaattattccanaatgtcaagaatgggtgttgaaaaacataccaggactttctgtgattggggttaaagatacaatctttgcaaatgagaatgctntagaaacattaagaaagctagcagatgggcctaanagaaatgttatatcttggaaaggatatgacataaacatgtattcattntacacaaaagcacaagatgacaaaagtacaatgcagaacagcggggtcatcctaagggctgaatctcaacacttcgcaagtgtgaatgacgccaatccctgtgtagcttccatcccttactttgngttcatttgatgaaattgggagcttaactatggngaaattactatantgtttttcaaatgtaaatgggttgacagcaacaccggtgtacgcaccaatgacat

SEQ ID NO: 36297 - DNA, 453 bp, Glycine max
tcttatccaaggctcatcttggtggtgaagctccttcttccatggcttattccctagtggatggcacctcctctcacctcttctcatttgtcttccgctgcatctccatggtggaaaatcaccattaaaggacctcattgaagctcaaagatccagcctccatagaagccccacaagcaagcttccatcacaagataccttggacacgcatgtatatggcaaaatagctcacaaaatatacgtatgtttaggtagcaaaatacctcaaaaaaaaagagagagagcaaaaagagagcgagcaagaaaagaataagaaaaaaataataataaaaagttgtctagctaaaaaacaacatgcttgtgaaaagagataatttccaacttttctttgaaagattttactgatcttaaccagttttttgaaaaaaaaaaatgtgtgtacatatttgaagg

SEQ ID NO: 36298 - DNA, 367 bp, Glycine max
  unsure at all n locations
tcaactttatattatgattcatcctatgcgaccaaattggtttaaaattaacttaataaaaggttacctaagtttgcacatctttgtgattgttggggcttgcgtatttcatggttgtattggaagatttctgaaagcaataaggttaagacttatatgaatgctattgaggagcagttcgttagctctgataagtccatggccagcaccctaatgaaaaagctntcaagcatgaagtatgataatattaaacgtgtgcgtgagaacattatggaaatgatggatactatngataaactaaagtcccttgaaattgagatttctgaatcatttgttgtccatctaattctcaactcacttcctcccg

SEQ ID NO: 36299 - DNA, 445 bp, Glycine max
  unsure at all n locations
tcatttagaaggatctagaggctcaacactcatatgccttncttgcttgggtcacaattctcttgcttagctactccataaacctagtttcagatagtagtggacaagtctacgctatttcagaaggctaattgctacaaaggcaaagagttgtcgatagaagaagatgaagatgcttctcaaaccagatatgtgaaggcttgcccatgaaggctcttagaacatgagcttgaggctctaaaaaagaagaatgagcttaccagtctgggtctggattgatttgctatgaagaagttttgttgattgaaggttcattgttcaaatctggaaccagatgagaagccactaatagaaggagttcaacatgagatagggtgttactatcagactttgaaccattcatgttttacttaagaaactcctttcaacatggtctgcccatggg

SEQ ID NO: 36300 - DNA, 313 bp, Glycine max
  unsure at all n locations
cccatttctaccaactacaaaacctaagaaaactatattatctacacaaaaggtacacttctctatatttgcatagagggtgtttttcctaaggactgaaagaacttgtctgagatgtcctaagtgatcatctagcctcctactatacactaaaatatcatcaaaataaacaactacaaatctacctatgaaatcccttaagacatgatgcataagcctcataaaggtgctnggtgcattagtgagcccaaaaggcatcactagccattcatacaaaccaaacttggtcttgaaagcagttntccactcatca

SEQ ID NO: 36301 - DNA, 442 bp, Glycine max
  unsure at all n locations
ntntgattcattctatgtacccgtagtggtccacattgtgtttcgtgcatttttattctcgttttgtttactttttataccccctcttgacgtgcttaagccattttacttaagtcatttctcgcttaacttaaaaataaaataaatttccaccgaacgtttgaattgtattatccgttaacttcggttaaaataaattccgaccgttcggtcgtgccgtaaccacgttggaaatcaaaaaaacgaggtaaaaaataatataataataataaaaaatcttttagcaaaataaagcggaaaatcaatcgaacgttttctctttgggatttctcattcttaatcgaattgattaataactaaagtgaaactaaggctaaaatcaactcacctagtcaagctcgtccacaaaaataggcttttgaagtatgtcatttcaatttct

SEQ ID NO: 36302 - DNA, 458 bp, Glycine max
  unsure at all n locations
ncagctngctttgtggtcttttatggaggctggatctttgagcttcaatgaggtcctttaatggtgattctccaccatggagatgcagtggaagacaaaggagaagaggagagaggaggcgccatccactanggaataagccttggaagaaggagcttcaccaccaagatgagccttggataagaagcttggagaggatgcttcaatggagganaataaagagggagagaaagagagaggtgggagcacgatattgaaggaagaaaaagggagagaagttgaactttgtgttgtgtctcacaagactctcattcatcanagttacaacaagtgttacacatgcttctatttatagactangtagcttccttgagaagctntcttgagaagcttctttgagaaaacttccttgagaagctagagcttagctactcacacccctctcataactaagctca

SEQ ID NO: 36303 - DNA, 443 bp, Glycine max
  unsure at all n locations
atgatacttgttaatgttntcttactaattgttcttatttgtttnttgtattaatttcttttataataaactcacccctcgcaatttttgtaccgtgtggttggtacctgtgatgatcgcaaacctttgttcgtgggagcagaatgacagcagtagtggacaagaagtgagattctttcgtggagccaccgagctgacgtgatgaagttgggattattttgggagagagttgtgttttattaatcaactcctccatagctggttccgtaattctttttgttgatttcaagatgtaaatcacaaatttaattatatgtatgaacaaatttattttccattatgtgaatgatgtgtactaggttactatacctatatatatatatatatatatatatatatatatatatatatatatatattcacttacgtaatggtgcattgcg

SEQ ID NO: 36304 - DNA, 346 bp, Glycine max
  unsure at all n locations
agcttggatagatgcttcaatggaggaaaagagagagggagagatagagagaggggggagcaccacattganggattaaaggagggagagaagtggaactttgaagtatgtctcacaagactctcattcatcaaagtaacaacaagttttacacatgcttctattcatagactaggtagcttccttgagaagctttcttgagagaactaacttgagaagttcctttgagacaacttccttgggaagctagagcttagctacacacacccctctcataacaaagctcacctccttgagagacttccttgagaagattcctaaagaagctagagcttagctacacaca

SEQ ID NO: 36305 - DNA, 464 bp, Glycine max
agaaggtgtgtagcccaccatcttttcatagtagaatactgtttttgcgtctactattattgtcatcattgtttttctctgtcattgaggtgctacttgagctgccaagtctctccacctttgggcgtatcctttgaaagatccgtaccctctttttgcacatgttctgtagttgcatcctatccgaagacattatactgacactgcctaatgaaggcaaccactaggtccttccaagaatggactcgggaaggttccaagttagtgtaccaggtaacagctaccccagtaagactttcttggaaggaatgtatcagtaattcctcatcttttgcgcatgcccccatcttccgataatacatctttagatagtttttggggcaagtagtccccttgtacttgtcaaagtccaacaccttgaacttgggaggggtgatgatattgggttctaggaaccaactttt

SEQ ID NO: 36306 - DNA, 493 bp, Glycine max
  unsure at all n locations
cagctcggacccgggatccttagagcacctgcggcatgcagcttttttgatgtgaatcttgatctgtcatatcgcacttgagagggtgtaaaaggtgcctttcttttcctagaagccatatgcaaaatataagacaaaacacaagagattagcacatgtttattctcaagaaaatagaaaaattaagattgataacagagttgggcgcttagcacagcaatatggcgcttagccccttcacaaaattactcatgggctaagcgtagcaaactcgcgctnagcctagagactcanaatctttntgtctacagattaggcttagtgcagcaaggcacgcttaacctanacctacaatnttagaaatagtaaaggacttgggcttagcgcagaggcctgcgctnagccttattacgaaggtaaagaaacagaacctaagtggcgcttagctcagtaagtngtgcttagcgcctgaactactctgagtatctcagta

SEQ ID NO: 36307 - DNA, 460 bp, Glycine max
  unsure at all n locations
tctgttctcacttgatgtgtcccttacatgcatgcacaaatttatacttctatgctacattggagctattgttttctacttggttgaggtaagttgttcatatgagacttaaagctgtgactactgtgtggtgtgtggagttgtaaattgtaattcaccatacttactgacagttcaatataattttggacctattttttgtcactgaataagttacatttcctatttcactttgattttaattttggactcttttttttttggtcttgacatagcatgtttatttaattctgcagcctgctgctcccaaactgggtacgctgatgggtgtctntattccatgtatacaaagcatnttgggcatcatctactacattcgtttctcttggtaacttgtaaattgctttaaatcttgtcttatattttagctcgtttgaggctnttggaacctaatatctga

SEQ ID NO: 36308 - DNA, 412 bp, Glycine max
  unsure at all n locations
agcttgtattctctnccatccncccagcanagtcatgtgatagttctgctggtaggagttgtgttttaaacaacaataagccttattccaccaagtggagctaatatacatgtcaaaatcactaattggcatccacatttgagaatccaaagtgcatanaatttattgattactaagttactaacttcctttacttacaattttggcaatgatcgttctatttcaatctcgttaacctatgctctgctcattcttatttttccctgcatgatttccttgggactacagatactgatgttanttttagttgcataattggtaacgtttataatattgttgcatgctttngaaggtttaattacggaactgggtagaattanaaaataccataatgggattttttaaataaata

SEQ ID NO: 36309 - DNA, 461 bp, Glycine max
tcttggagtcttctatgcaatgcccttgaggggtatgattatttcattccctccccccttgaaaaggatttgatctcaaatccataggttcttgaaactcatggattctttcctcaacacctctaaaaagaataaaaacatatgtattagtgatgttgggtatgttagagtacgataaggactgaaaacccctttcttggccatcttcccatgagagaatatagttcctcaccaactcagtgagtggtgctacaagtatagaaaaatatgggataaaccttttgtaaaagtttgttaagatattgaagcccctaatttcccttatacatggtggagtaagctactcaagaatgacctttattctcttatggtccatgggaagcccttgatcactatttaaaaagttaaggaaagtaatggaataaaatataccttctttctttattttcatgttgattatt

SEQ ID NO: 36310 - DNA, 116 bp, Glycine max
  unsure at all n locations
gtccaacacggtgttaacggctcctatgactgccttatagaatgacaccncgccctgacactcctcgcagactgttgtattcattaacactccgcgataaggaagcatcacaactg

SEQ ID NO: 36311 - DNA, 221 bp, Glycine max
agatggggttgttgatactggcgaagagggaacaccagctgctctggacctggttttccttgcccttggaaaattaactatttggtcattcacattccaacatttcctttaatataggccaagataatgaccagcctcaggctcttgtaagcagtaagagcatcagatccaactccccttgacctacacaagactttgattaaagctgggaagcctaggca

SEQ ID NO: 36312 - DNA, 429 bp, Glycine max
tgagcttgccctccattatgagcatggaggagtttgacgctctaggtggcctggccaggagaccagtcttcttcctctagagggggtggggcctccacaacccaggagcctgtgactaaggagcctgcagcagaggaagagaccactccagctcagactcctcagccatctccaccatctgaacctgctcctgacgagactcaaccatcatcagcactggatcttaatgaagaccagccacaggaggagcaggacgtttaattttttttttttgcattatgaacactttagttttatttcagttattttatgctttatgtcatttaaatttcagcttttatatttcagtagcatagttgtttgtttgcttgaacaaaaagcttgattgaacagtgaattgattgaacattgcatgcagtggattgtttg

SEQ ID NO: 36313 - DNA, 356 bp, Glycine max
  unsure at all n locations
tgcttttgatccaaaatcctgacacaccataaaccttgacccagggtgagaatgtcaattcttaccctcggaagcaaanaaaaaggggagagggaaaatttccaatcaaagaggaagcanaaaaggagagaaggaaaatttccaatcaaaggaaaaaaagagaggaaagggaattcccaatcaaagagtgggagaaagcaaaaagattagaaagaaaattcccaatcaaagaatgggagaaagaaaaaagagaagaagatagggaagatagttcccgatcaaaaaaaaaaataatatgcagaaagggtcttggaccggacaatatctgaacaatacagaattgtcaccaaatgaat

SEQ ID NO: 36314 - DNA, 426 bp, Glycine max
tcttagtttcagatgatgcagatggatttgtagctaccttatgcactcctctaatgactatggcatcatttctggcgctaaactgttgggagttggaagccatcttctcaattaaatttctggcttcagcaggagtcatgtctccaagggctccaccactggcaacatctatcatacttctctccatattactgagtccttcataaaaatattggagaagaagctattctgaaatctgatggtgggggcaactggcacatagtttcttaaatctctcccagtactcatacaggctctctccactgagttgtctaatacctgagatatccttcccgatggttgtggtcctggaagcaggaaattttttttctaagaatactctcttaaggtcatcccagctcgtgatggaccttggagcaaggtatt

SEQ ID NO: 36315 - DNA, 407 bp, Glycine max
  unsure at all n locations
cgatcactcggaccgggatccttaagcacctgggctcagcttttatcatcttgtcccgatggcccatgtgttcgtgcttntattctcgttgttacttttatacccccttggacgtgcctaagccatttacttaagtatntctcgcttaactanaaataaaatagatttccaccgaacgtttgaattgtatatccgttaacttcggctaaaatgaattccgaccgttcggtcgtgccgtaaccacgtaggaaatcanaaagaggtannaaataatataaataaacaaagaacatcttttagtaaaataaagcggaagatcaataggacggtttctctttgggattctcattctcatcgaatggataataactaaagtgagactaggctaaaatcaactcgcctagtca

SEQ ID NO: 36316 - DNA, 426 bp, Glycine max
  unsure at all n locations
tgcctcanagagatccaggaaggataaagcgaccgtaggttccagttccgctcccgagtatgacacccacctctttaggagcgctgaacaccagcagcgcgtcgaggccatcaagggatggtcatttctccgggagcgacgcgtccagctcagggacgatgagtataccgatttccaggaggagatagttcgccggcggtgggcatcactggttacccccatggccaagttcgacccagacatagtcctcgaattttatgctaatgcttggcctacgaaggagggcgtgcgagatatgagatcctgngtaaggggtcagtggatcccgttcgatgcggatgctatcagccagttcctgggatatcctttagtgctggaagagggccaggagtgcgagtatggtcagaggaggaactgggctgatgg

SEQ ID NO: 36317 - DNA, 223 bp, Glycine max
gttttttcagatactaagtagcacatggatgtttctcacaatctgtttaccacagagtttttactctctggtaatcgattaccagatcatcgtaatcgattactattagcgaagatggttataaaaaaactgttaactgaatctacaatgttccaatagatttcaaaatgttgtaatcgattacaatgtattggtaatcgattaccagtgtgctagaacgttg

SEQ ID NO: 36318 - DNA, 417 bp, Glycine max
tgcctgatactatctgagatccctttgtcgttgccttctcttcgagggtgaagcttaaggagaacccaggctcctatctggtagttcacttcgcgacgtttcccatcagcttggcttttcatagcagcttgttccttagaagcttatttcgaatagcttggaaagtgatatccctgtcagttaacatctcttcaacggcctcaatgttcgaagaccctgtaatatattctggatagttaaaggttttcggctaaaggtaacaccatacgtagtggctccagttcccacattccatgaagtattatgggatcattcgacccacgagaggagcttcccccacaagcttggccgaggatggatgaaggctcgcaaatattgttcaattatgcgattcaaaacctctgtctgtccatcaat

SEQ ID NO: 36319 - DNA, 401 bp, Glycine max
  unsure at all n locations
gtgttttgtttgtgacttgtangattcaatttgggcaaaattggatgagggaaagagtggttttcgaaatctgcactttatgcagaattttgttgttgaaatgtgcagcagaattttgtataagtgcagaaaaatgcttatgtatggctggttgtgaaaagggtagtacatatggggttctggacattttctagcagatcccaacggtcaaaatgtatacttatgtactagagacttccagtaaaatatttgagtcgatccaacggctaacgaattggaacgaaggatatgttactggggtatttgtatgtgacaagctatgatcttgagttgtgttttgggccaagttttctgcctttgccctgttttgcttgcgtttgttagtccatgatgattggacg

SEQ ID NO: 36320 - DNA, 377 bp, Glycine max
  unsure at all n locations
gacactctcgaacactcacgcttatagaatatgtanataagagactctgactatttcttaatcattcatgtttccatggatgaaacaaatgctatttctcccagaaaggatatttttaatgatgttgctaaatccttataacgaatgcatatccttggacactattctccagggacagggagaggaagcattgaaaatcctcccgaaaaagatcatccccttgaccacattattggtgatatctcagaaggggtaacgactaaacattctctctaagatgtatgctataatatggcttttttatctaagattgaacctctaaatataaaagaagccgtattagatgagcattggatagatgctatgcttgaacaact

SEQ ID NO: 36321 - DNA, 379 bp, Glycine max
agctttcttaagaaaacttccttaaaagcttagggggtgtacttagtaaaaatgggggtgcaaatagcaaccaggcccacttgggccctccagaatattcctccagaaggttgttgcttctggaggaagcaaccctgctcgcctgggcgagctgggcagcaagcatctcccctattttgctataaataggggaggaagtgagaaggaaaggggttcagccccttaggcacttctctctctttcgaatttgcttggaaaaattgtttccgtgaagaaaatctaagccgaggcgcttccgaaacgtttccgtaacgtttttcgtgaagaatttcgcaaaggtttcgaccgttcttcgacgttcttcatcgatcttcgatct

SEQ ID NO: 36322 - DNA, 408 bp, Glycine max
  unsure at all n locations
tacaactacccaacacaattcaaatgggaatttgtttgtatttaatatttaaagtaatttaaatgtaagataatatatatagccatggcactagaaatcaaactttaaaagtataagaaccaaaactataatagaaaaaaattagggtaggtagaaaaaatatattagaatcaaatatatgtatgtgtagtttcattacaccaatttaaatacaatattttctcaaatgattaaatatttttgctaagtattttcacatganagtttcattaattcaaaccaacctcagggagctacaggtacaatcttgcccgagcagtatcaaacccaatagaataatcattttcctgcaaagcaacaaatttagattttatcataatatttcaagttttacaactaataaataag

SEQ ID NO: 36323 - DNA, 402 bp, Glycine max
  unsure at all n locations
acaagcttttatttcctctttcagaaccatgctatgtgctcgcgactggtctctttcttccctccgcaacttgagttcactattgctaccccatagagctccgcgaaatttgttccggccatactcttccttgcgagccctcttggtctcttgttcaagggctcttgcggtaattgcattctcttcccgtaacccggcacactccttccgaacgtgtgtagcggccaacttgatcttctccttggcaagttttgcctttcctaactcgcttttgagagattggacttcttcgtcctcttccggtgcttcaaaatcctcttcgctgacgacttttaacttggagagccaatctaaacctcgtatatgaactttcagccattcgtggtacccaccaatgatacn

SEQ ID NO: 36324 - DNA, 369 bp, Glycine max
  unsure at all n locations
tatagaatatataattacataactaagaccattttagattttattcatggcaccttccgatgaggctagagtgctattttctcccacaaacgatattttanatgatgttgcagaatctttacaatgaatgcatattcatggacaatattctaaagggtaagggaaaggaagcaatgaagatcctcccgaagaagatcattcccttgacaacattattggtgatatctcaaaaggggtaacaactacacattctcttaaagatttatgcactaatatggcttttttatctatgattgaacctataaatataaatgacaccatattacatgatcattggatagctgctatgcaagaagaactaaatcactt

SEQ ID NO: 36325 - DNA, 375 bp, Glycine max
agcttctatgaaggttggatctttgagtttcaatgaggtccttcaatggtgattttccaccatggagatgtagcggaagataaaggagaagaggtgagaggaggtgtcatccacttgggaataagccatggaaaattgagcttcaccaccatgagagtgccttggataagaagcttaggaaggaaacttcaatggaggaaaagaaagagagagagagaaagagatacaggggagcacgaaattgaaggaggaaaagaggaagagaagttgaactttgaagtgtgtctcataagactctcattcatcaaagttacaacaagtgttacacatgtttctatttatatccgaggtagcttcctcgagaaacttccttga

SEQ ID NO: 36326 - DNA, 407 bp, Glycine max
cgttgctcctctcttacacctgcagatgtaatcaagtttctcataggagattttaggttgagtaaagctcgagccagtgatctcttttgggaagctgtttggcctcgtctgttagcaaaaggctggcattctgaacagcctatagatcaagttgtttctggatcaaaacaatctttggtttttcttgtacctggtgttaagaaattttcaagaaggaaactgataaaaggtgaccactactttgattctataagtgatgttttgaataaagtagcatctgaccctgagcttcttgagactgaaagtcaagcaactgagggcagtgtagatagggaaaaaacagaagacaaaggagacctagagggtgtgccaaatagggaacaagttcattaccttcaatctcaaag

SEQ ID NO: 36327 - DNA, 389 bp, Glycine max
agcttctaaactttatacaagaattaatctctgataccacttgttagacaagtggcctcagatatcttaagaaggggggggttgaattaagatatcccaaattactttccacaattaaaaatttatttcactttcttttccggttatagattcccttaacaatgaacttcttaaatattaattcaaataaaacaatttgaatatgaatgttaagcaataataaacaaaggaggttaagggaagagaaagtgcaaactcatatttatattggttcggccacacccttgtgcctacgtccagtccccaagcaatccgctagagagttctactatcttgtaaattccttttacaagttctaaacacacaaagacaatccttccttttgtgtt

SEQ ID NO: 36328 - DNA, 444 bp, Glycine max
  unsure at all n locations
ntgtggagtagaaacatgggaccaactcattttatttcaaaaatgaagtcatatctagtcaaggtctgagagaccatacaagtttcctaacgatttctaattatgtgggccattaagtctatcatatgctgacaatagccgagaagcccatgaatctcttcgggggcggagtaggtgtctgccatcgccttggccttggctaacaatcggggaagttcttgactcccgttcaaggtaagggcaaaccgatccatccacatggttgcctcttggtgtaaagagtcgatcacccttcctctagcctctttttccgcgtatacttgggcatactcatccgcgattctatgctcgtgggctgtggctagacctaactcttcttggtacttggcgatgatagctagcatgttggtctccgtctcgcataaacgctgagacaagcttctt

SEQ ID NO: 36329 - DNA, 365 bp, Glycine max
agcttggaaggatgcttcaatggaggattatattgagggagagaaagagagagggggtagcacgaaattgaaggaataaaaaagggagagaagtggaactttgaagtatgtctcacaagactctcattcatcaaagttacaacaagtgttgcacatgcttctatttatagactaggtagcttccttgagaagctttcttgagaaaacttccttgagaagcttctttgagaaaacttccttgagaagctagagcttagctacacacacccctctcataactaagctcacctccttgagaagcttccttaagaagattcctaaagaagctagagcttagctacacatacctctctaatagctaagct

SEQ ID NO: 36330 - DNA, 449 bp, Glycine max
  unsure at all n locations
nttcgattcattctatgtacccgtggtggtccacattgtgttttgtgtatttttattctcgtttcatttactttttatacccccttttgacgtgcttaagccattttatttaagtcatttctcgcttaacctaaaaataaaataaatttccaccgatcgtttgaattgtattatccgttaacttcggttaaaatgaatttcgaccgttcggtcgtgccgtaaccacgttggaaataaaaaaaaaggtaaaaaataatataataatcaaaaaacatctttttagtaaaataaagtggaaaatcaatcggacgttttctctttgggatttctcattcttaaccgaattgactaataactaaagtgaaactaaggctaaaatcaactcgcctagtcaagctcgtccataaaaataggtttttgaagtttatcatttcaatttcttgctaagt

SEQ ID NO: 36331 - DNA, 405 bp, Glycine max
agcttctaaactttatacaagaattattctctgataccacttgttagacaagtggcctcagatatcttaagaaggggggggttgaattaagatatcccaaattactttccacaattaaaaatttatttcactttcttttcaagttatagattcccttaacaatgaacttcttaaatattaattcaaataaaacaatttgaatatgaatgtaaagcaataataaacaaaggaggttaagggaagagaaagtgcaaactcagatttatattggttcggccacacccttgtgcctacgtccagtccccaagcaatccgcttgagagttctactatcttgtaaattccttttacaagttctaaacacacaaagacaatccttcctttgtgtttagaattcctttacaac

SEQ ID NO: 36332 - DNA, 445 bp, Glycine max
taacaatcagtgtcatactattgatcaaaacaaagtctgtatttatatgcaatactagactcaaaatatgcaacaaacactagacctaaatcagtgtcacagaaattggaagaaaatattttatccaagcacaaacttcaagccttattccatgtattggggggaagttatggctggccatatgggtagaggtgtcatagaggagcaggtatggaggaagggaccttggactgctgaagaggacaggttgcttgttgagtatgtcaggttgcatggtgaaggtagatggaactctgttgctaggcttgcaagtaagaaacaccaaacttttttcactgttttgtttcttaatatatatgattggattttcacatttataagtgacaatatagcaaaaaaacaactgaaattgttttcaacttctactgttcatgttggctacatt

SEQ ID NO: 36333 - DNA, 360 bp, Glycine max
tgcaagctgccacccactccccagcaattttgttgcttcctcctctggaggaacatcttggaaggcccaagtgggcctacttgctatttgcacccctctgtttactaaatacaccccctgcctttttttgctgattctttttccgtaacgttacagaactttacgaattctgtaacgatacttgttttccttccgtaatgttacggaaccttacggattacgtaatcatcccttttttggctttcggaatgttacagaacctcacggattgtgtaacaatgcttccttttgatttccggcatgttacggaacttcacggatcgtgcaacaatgctctcttttgacttctggcatgttatg

SEQ ID NO: 36334 - DNA, 429 bp, Glycine max
tcgagcctcatcgtgcactattggtaaaggtcctctatgattcttacgtagcacacaacatctcagtcgagggttttgaaggcattgttaatcacataactaccaataactatatctcgttcgcggaagaggagattccagttgaggggagagggcacaacaaagctctacatgtgtttgtcagatgcatggaccatgtcgtcgctaaggtactcatcgataatggttcaagtttaaatgtgatgccaaagaccaccttggagaaacttccttttaatgcgtcacgtctaaaaccgagttcaatggtagtacgagctttcgacggtagtcggcgggaggtgatgggggaaattgacatccccattcagataggcccccacacttgcaatgtggttttccaagcgatggacataaatcccgcctacaact

SEQ ID NO: 36335 - DNA, 308 bp, Glycine max
  unsure at all n locations
gaagctgaactatcgtgtctgataaacaacnacgtttaagttgattcangacaancaagacnagggagcggtggaagcatgatgcaacaaagcacttgaactgcagctgcttaactcttctttttgtgtatcttggcatacctatacgggctattaatgccacaaaatggtgacctgacgaccacagttttgaactccaaatatggtggatggaggaaccttgaagaaacaggaaattcaccaaaacaatgtgtgtggtggagggatgtaaaacaagctttcaatcaatctcaacagggactggttat

SEQ ID NO: 36336 - DNA, 425 bp, Glycine max
tgcaatgaaagatattgtgtatgtaggagtctggtgccaatctatactttcaaaccaaggccataattcaaaataggtaagatataaatgatgatagtcattagcacaaacattgacttctgcaactgctactaagcttgcaatcaaagatattgtatatatagtaatgaactttccattcagcaacacaaatttgttttatttgtatgcttaaatctgttagattgcctgttcaacttgaaatgtcaaatttctatcttatatattttatttggacaatatctaacaaaagatgcaacaaagaagtttactaaaccttatatcagagatgggcatcaattctttatatattgcttgtctggcacaccacaaattctcttttgatttgttttgtccatagattagacttgctttatatagttctc

SEQ ID NO: 36337 - DNA, 442 bp, Glycine max
  unsure at all n locations
gggtcccttgagtatgcatgcancgcnccatnggacaganccnggggcaaaagaccgagaaacaacacctttacgttagtagaaagacaccccagcgggcggccaatgggaaaanacaacccacaccaacgcgaacgaaagaaaaaaagacaaacgaaggagggagagacaaaagcgaaacacaaccgaagagacacaacacaagcagcccgagggngcgaggaccngacccacgaccaagaccacaagggagacaaaacgaaagagcacagaaaagaaacgaacnacgcacaacagggaccnacaaggaaagaagcgggagcaccgaacgcaagacgagagacaccaacccagaccaagaacagcgacacacaggacggcacaaaaaaccgaaagaaaaagaagaagggccaaccacgagcccaaaaaacacagacacacg

SEQ ID NO: 36338 - DNA, 427 bp, Glycine max
tcccgcatccgtacttggaaggacctgattactgctttcctattgcaatatcagtataattccgatatggctgccaatcgcactcagctacagaatatgttcaagaaggaaggtgagacctttaaagaatacgcgcatcggtggagagacctggcggcacaattggcacctcccatgctcgaaagggagatgatcaccatgatggtagacaccttgccagtgttttactatgagaagttggtaggttacatgccatccagcttcgcagacgtagtgttcgccggggaaagaattgaagtagggttgaagagagggaagttcgattatgtttcctctacaagtgccaatgctaaaagggtcggaacaactgtggcaaagaggaaggagggagatgcccacgctgtcacttcagcgcccgcgtgggtta

SEQ ID NO: 36339 - DNA, 298 bp, Glycine max
cagagcacctgagctgcagcttgattccttgcccgaccttttttttttatgtgcacccaaacccaaggtccgggtgagaatacaacctcctttctccctttgtcggcttgtttaacatagcttttatttttcctctcaattagatctttgactctctcatgaagcttcttcacatagtccgcctttgctagaccttctttatgcttaaaaacagaaacattaggcatatgcaaaagatcaagaggagttagtgggttaaaaccataaacaacttcaaaaggagaacaattaacggtgc

SEQ ID NO: 36340 - DNA, 412 bp, Glycine max
  unsure at all n locations
taaagtatgcccgagtcattcatccctatgagaagntgnttanatattgtcgatcagaattgccattcgttggattatggggttgaaccaagctcatgctttttcgaaaaaagttcatcaaatcaagttgaagaatggaagtaactatcttgcaaaaattggggcaaaagatgaatcgagtcacatcactgcttcgtctactgccaaacatatttaggattgttgatgtccttgttacttccagtttcaccttgacaaagatgtcatagaccatgtggaaaatctaaattgattcaaccctatatcctgcacaatacttcaactgtacatcattcgcatacatccatgcttttcattggttgcattgctcattgcattctttccttgaaaaagaaaataaaaataaataaat

SEQ ID NO: 36341 - DNA, 374 bp, Glycine max
agcttgtttataatactgtattatgtgtttgtgactttgagaggtgtgaacatgacgggtataactctttttttgatgaacaaatgttggccattgaacaagtaatcattttttgtttttttttttttttcatttcttaaccttccaactcactttatatgtcggtcttgaacaattaaatgaaaaccaaaaaatcttttgaattttgattttttttttctctcttaaccatccaactcactttatatatgtcccacttgaataactaaaaagaaactaaaaacatcctttgaattttgatttttgtaggtggaaccaattgagaaaaaagaagccatctgagtaagattcctaacagctattatggattgagc

SEQ ID NO: 36342 - DNA, 429 bp, Glycine max
  unsure at all n locations
gacacctagatactcaagcttangcatcgggagaaacgatctcatataacagggtactgttgctatttctgaacaaatgagggtcaacaggcccctgacagagaaacaatccagctatcatgcagtaagtctacccccacattggcttaccatgctgccccaaccatacctatattgaaaaacgaacactcatgaattgactgttagacaaagaagtatccgtgcgcctgcaagagataataagatgctgacatcatactccaaaccactgattagaccagactcacacctcttgtgttagatggatcaattcttaacaccacagaccgctatgcagattacttagatgcaactaataaaaaaccccggatattctccataagcaacggtcaaccacacgactacagatccaatccagagaggtagggg

SEQ ID NO: 36343 - DNA, 386 bp, Glycine max
  unsure at all n locations
agctcgctagctanaacgaaggtggatnntttatctcactttaggcgcctctaaatnggggggaatgtgtctcaaatatgtgtgggcaacttttggctttggttttcttgccttgattgcggttcgaatctgcggggtcttgtattgggatgtgccctacgtcctatatatgcgtttctgaagcaatgtgggcattgccacattgtcactcgttctcttgctattgaggcctaaacgcgcgcccaccaagtgttcggtgaaatgcctcaatggcattatcgcgtgacttttgtaaaccaacaacccatggggcattttggtttgcacatatatcctattttttgggacatgcattcattcccgacaaatgctagagtaattgcccc

SEQ ID NO: 36344 - DNA, 264 bp, Glycine max
cctttcattctgacatcattcaagaactccttagaaccccccaagaaccacagacaaaggctatgactgaaaaagctgtgaaggttgttgaagaggtcaagttcttctcatattatgctcatcacgttgccactagtgatcatgcaggtgatatcctaaagagggtctacatgattccaaaagaaagggtacacattattctcaatggtgtgggccaacacgctttcacgccagatgtttcgaaggggaaggacttcaaaaaga

SEQ ID NO: 36345 - DNA, 373 bp, Glycine max
  unsure at all n locations
agctttgagggtgcgtagcccaccctcntttcatagtagagtatcgataatgtgtctaccatcacgattatcatctccctttccatcattgggggtaccacctaggccgccagatccctccaccttttgggcatgttctttgaaagatccgtccccctttttgcacatgttctgtatttgcatcctatctgaaaccatatcaaaattgtactgatactgcctaacaaaggcaaccattaggtccttcgaagaatggactcgggaaggttccaagttagtgtaccaggtaacagctaccccagtaagactttcttggaaggaatgtatcagcaattcctcatcttttgcgtattcccccatcttctgacaatgc

SEQ ID NO: 36346 - DNA, 401 bp, Glycine max
  unsure at all n locations
tgagatgaggaagtgttgaagggngaaacttcttgtctnnttttgttgaccacagagtggtacctggagatatgtttcgggggtcaggagaccttggggacgtcaggtggggtgctattgcccaaaaccaagcttgaccaatcccgacccaacccgggcatagtcggtcagtgagaacctgtgatgtacctaagcaggcgagctcctggcagtcaacagataaaaggaaaacaagaccacaaagcaaggaggcttgtggtggctggccagctgtgaattttgtgtaatatgtggattgtggcctctggtaatcgattaccaaaggtgagtaatcgattacaaggcttaaaattgaggacaggaggctaagatggtctctggtaatcgattaccaaggggtg

SEQ ID NO: 36347 - DNA, 245 bp, Glycine max
agcttgccacatgtattcaacaatcagcatcagctgattaaaatatatttttggagcccttgcggcggcacaaaacgacaacgcgccatgagtgagaataaacgacgatgtgaggcgagagaagagagtttatttaccgggagtcttgacgactctgtgctggttggatttggtggcatagctgtagcgcttgcagtaggtgagacgttgcaccatcttctccgataacttcttccaaaccctag

SEQ ID NO: 36348 - DNA, 450 bp, Glycine max
ctcaacaagtttcttcacagatatctatcatgaagcagaaaactcgcattactacccatcatatctcccaaaaggccatacccacgaaatttaagagagaaagaagtccacccaaacctgaaatttcgaagtcccactcgtagccacgcacttcactactccaaaaacgccctcctttcacgatttggggcagaaatgatggccaaaggttgaagctttgttggggtttcaatggagaatggaggagaagaggaagctacgtgagagagggagagaaaaggcttctgaacttctttcttttggctgagtgaggagagagaaaagctctttggttttaaataaaagggttttctctttttctattattttatttaagcaatgccacatgtctccatttgagtggagcaagaagggcccactttccctttttgactgtgacccatactcagc

SEQ ID NO: 36349 - DNA, 246 bp, Glycine max
  unsure at all n locations
agcttccatctttgattgaatnaaggtnttaanttttgcagcancgcaaagangctgagacatcttttatcccatccagcgggaagtctgatgacactgctgattataccccgcttgatagtgtttcttttattggtgaaccacacactgatacaacagaactgacagatcctaactttaatgctgaagatcctctaagaaatttttattcctttgatgaagaagttattaaatctgatgttcaaa

SEQ ID NO: 36350 - DNA, 442 bp, Glycine max
agtgtgaggggatactaagcattctttgcaccaaatgacctatcttatcgataagccacgaaaggaggcgttatggttttggctccatgactggtaatgaaaataaagagactgtaatgcaggttcctgaagaactttctgagataaaaaatatgaagaacatgtatatccaactaactctatcatcacttcataccttggaacagatcatgggtagaagctcaactgtaaacatgttcccatcttctccaaacaactaagctttgctattacaagagaattgaaagaagaagaaaaattgcactagagaaagcaacctagtatctaatagtgagaataacatggatctacttgtgcttgtacatggctgatattatagagactaatgcagccatccaattagttactccgaatatattacacatgatgggtgttgactctc

SEQ ID NO: 36351 - DNA, 227 bp, Glycine max
  unsure at all n locations
agcttgtaatcgattacacacatatctgtttcgattatcagaggagattntcagaaagatattctcaattgtcacatcttttcagttggttcttgaatggctatcaaaggcctatatttatgtgacttgagacacgaatttgctaagagtttttcagaacaaaaaggtcttatcctcttaaaaaccaaaatcattttatcctcttacaaattccttggccaaaacac

SEQ ID NO: 36352 - DNA, 444 bp, Glycine max
  unsure at all n locations
taagctccttcaactgcacaaggctcttaatatttgatgagatccttgtggaaccttcacccgacgaagacgctgactaaaacttatattatccttctttgacaaagtatggcaggatagggacaagtaaattttcttcccatcagaccttggatgcaactgtgatcgtatacccatatcagctagatcttgacgggtattcaagccatccttcgtcttgccttgaatgttaaggagcgtcccaatcacactgtcacaaacatttttctccacatgcataacatcaatacaatgtctaacgtcaagatcacaccagtacggaagatcaaagaaaatggacctcttcttccatatgcaactctgactnttatccttcttgtgggtcttcccaaatacagtattcaggtgttgaacccgctgatatacctgctcactagtcaacga

SEQ ID NO: 36353 - DNA, 360 bp, Glycine max
  unsure at all n locations
agcttcaactcattctatcagatctaagttttattttgctnnnatacaacgaaaaaggcttattttgctccatcttaatcctactattttatctcgttacatttttatcccttttaattcatatccttacatatttgttgtcttttcacgacgtcttttgcaatctattcaactacttgttctgcacttaaagtattacttgtaaaacgtagccaaaaaacaaaacattgcttgcacaataatttcattgccaattgatttttctttatttttctatcaaaatggagtgactgtaccattttttcaattaatactctgcgcatatcatattctggagtttataaaacattccatctttat

SEQ ID NO: 36354 - DNA, 428 bp, Glycine max
atctaagtctaacctattattgaaatttttaactccgggcctgatgtaggctaagtgagttgggtgtggttccacccctacctctcatgaactgtggttaaatgcctcttgcgaagcgtgaaagaagtactattgtgtgtttgtattagttcattttatatttaatttttttggataaaagctttacagaaacttttacaacattgaaaataactagataattactacaattgaacttatgttagctccagattcattggacctctacttaaattcagaagttgcagtgcacagtatcaaaggaaaattatctatgccttaattaggggattttttttatgacaattaggggattggtattactgtattgtggaataaaacaaatccgacatccagatttaaaccccacttgtatctttaattaagat

SEQ ID NO: 36355 - DNA, 236 bp, Glycine max
  unsure at all n locations
aaacaaacaaancagcgcagcgtgacaatnanagangccgccccaacaccncacccacgcaagagaancacacaagaacggccnnactcnaaagaaacacacaggccnnaaaccacnccaacaccccaggagggcgcaggcaacgcaagagacaanggccacaacaaagaacagaccaccaanacgcgnaaaggaaggcgacacaaggaaaagggnaaccaagaaaaaggccaaca

SEQ ID NO: 36356 - DNA, 328 bp, Glycine max
  unsure at all n locations
agtgtgatncaacaaaatccagcattgactacaggcttantttatgacaagccaanggaaccgcgcggtaggtttaatagtacaattattcccctttaatctttatagcacctatcttgttacaataaaacactgagatgagatgaatatgtttcactcaaaaaaaacggtccgtcctaatgttgaaaatgagtattccaccagataacaatgtgcgaaatttggacctaattaacttataaacctaattaattttaacaacaataaataagtctatattttggaggaaagaaaattttatctctctcaacaagcataacacagctat

SEQ ID NO: 36357 - DNA, 311 bp, Glycine max
  unsure at all n locations
gaaaaacaccanngaaggaccncaacgaagcacaaagaacgagccnccatagaagcnccacaagcaagcnnccatcaagtggtaatcagagcacaagagcttcaagtaggagctccttaaacctccattaattttttttctttaccttctctgccattgatgtttcttcatttttatccatgtatctcctcacatgtcgggcgctaaatgttgttaacatgattctttacagtttccaccaataaacttgctatagaaactagattcgatattctatggatcaacattcttgctcttgctcttgaaccatg

SEQ ID NO: 36358 - DNA, 428 bp, Glycine max
  unsure at all n locations
tagcacgtgaagacatggcgcttagtgcaagggttgttctanattgggtggaaaactaaaaaattattgtaaggcttttctgtccatcttttcacctaggcttaaaaagcccccttgttcactactaaacgaactgaaaaattaatcataatcataagcaactatcctaattacatgcaagagatacaaaatgaaaaagagaaaagggaaagaaaagttgggttgcctcccaataagcgctcttttaatgtcattagcttgacgcatcatcctgttatcctgtgtccaataaggttccaacttccagaaccttcttctttagtctttgtttcttcatcacattgaccttcaaacaaacattttggtcaggcaaagctctctcttcatgaaacatatcgaaactgatttgctggtcttctatggccatt

SEQ ID NO: 36359 - DNA, 494 bp, Glycine max
  unsure at all n locations
ggggaacgagtgagacctggatcctcagtanatcngagatccttagagtgacccgcggcatgcaagcttgtccacaaaaaataagtcactaaaaaagttttgatagtttatcatctcagttttcctgatcaagtaaatggatcatttttaaggtccaacgccttaaaatgatcacctttcaagtaaaaagaatcgcttgattcacgcttaagaaagaactacgtaggtttgatttcctcatcgatggagggtacgtaggagcaaaagccccgcttttgtcgacctcaaaaaataaaaagaaataaaagttaaggtaatacaatttccacaattctaaaaaataggttgttgtcctttgagacaaacgtgagaggtgctaataccttcctcaaacgtaattacaactcccgaacttagaattttcattttgatcggttcccttcggtttttctgatgttttccacaaataaacgttggtggcgactccgcgcatn

SEQ ID NO: 36360 - DNA, 412 bp, Glycine max
  unsure at all n locations
cctgtatcagtgcgggttcgggagacaaaggtcaagcgnncgttaantgttatagatganatnccgagtactggggatttggtacgaccatgctctcctgatttccagctgggaaattggcgagtggaggaacgccccggcatttacgcaacaagcataatgtaaacctttacggttttaaaagctctatagttgggcctaggctttagagttttcattttgttaaagctttgtgtcttttgtttttgaatttataatacaaggatctttcttcatctgttcctggtctctacccattctcattcatttgcatgtttacttcttttcctaaaacggcagattcaatgacaagtcccccgaaggtactaatacctgngacccgtctatcaacttcgagcaagaaatgaatcaa

SEQ ID NO: 36361 - DNA, 383 bp, Glycine max
gaccgcggcatgcaagcttgacagtgcgcaggagcgcactccttcacttttatacattataactggcggccgatgaatggtataataaggacttccttctctaaccagacttgtgaaatcgcaaaacaagaataaaaatacatctaaaaggagcgtcttctcgtaagtcctcgaaacgttcagcgaatgtgccgtccaagtattctttcgccatccttctagacacagatataatagcctaataatagccttgtccttatgttctgggtggatccattaattgatagtacccgctttttgtatcccttatcgacaactaatttgtcagccatctagttatgatggtagacatatgatcataactttgatcacgcgcccatatt

SEQ ID NO: 36362 - DNA, 428 bp, Glycine max
  unsure at all n locations
acaccttagaatactcaaccttgtgagtctccagacgacgatagtaaaaacctgcaaaantttgatttttttcagaatcggacgaccaggatcattcagataccgtcgaattcgttcacctcgattgatgaaaggagcggatgatcataaggtatctctgcctgccacctaacttgctgtccctggatgacaaaaggtgcggaagacgatgttattctctgtatgtcaacgggctcgtttgcccctggttaacgaaaggtgcggataaccatacagtatccccgcatgtcacctgacttcatgggtcaggatgacaaaaggtgcagaacacgatgttagtctctgcgcgtcaacgagctcgtttgcccctggttgacgaaaggtgtggataaccatgcggtacccccgcatgtcattggacttggcat

SEQ ID NO: 36363 - DNA, 318 bp, Glycine max
agcttggaggaggagaaacatgggaccttcctattgtatttcaaacaaagaagtcgtgtccagtcaaggctctgacagaccatacaagcttcctaacgatttctaattatgtgggccattaagtctatcatatgctgacaatagccgagaagcccatgaatctcttctggggcggagtaggtgtctgccatcgccttggccttggctaacaatcggggaagctcttgactaccgatcaaggtaagagcaaaccgatccatccacatggctggctcttggcgtaaagagtagatcacccttcctctagcctgtttttgc

SEQ ID NO: 36364 - DNA, 451 bp, Glycine max
  unsure at all n locations
agacaatgcgaaactttgacnctctacccttgtannacccaacttagacacgcaccggcactaccaaagggataaagagaatttttcattgnatggacncaaccacacgggccaccgagcccatcaagagnacacaacaccccgcccagcccgcgaacacccacacaggcagaacacacnacggacacggcccgagcngaggccagcaaccgcaggaggaaccgacaaccacagaaagccaaggcgaaccaaaccagccacaaggaccccgcacgacgcaaggcaccaancacccaaccacgagcngccnncacagcgcacgcgagagcaaacaacacgacgacccggcgcgcaaggggcaaagaccgagaaaaacacgaccgggaccaacccaaaagagcaaacaagcagagcnccgcggangacaaacccgagagccaaacgaaccagc

SEQ ID NO: 36365 - DNA, 372 bp, Glycine max
  unsure at all n locations
agcttatcaaggaagctacctagtctangtanagaaacatgtgtaacacttgttggagactttgatgaatgatagtcttgcgagacacaactcaaagttcaacttctctccctcttttattccttcaatttcgtgctccccccttctctctttctttttctccattaaagcatcctcttcaagcttcttatccaagacaattcttggtggtgaagctctttcttccttggcttattccctagtgaatggtgcctcccctctcctcttctcctttgccttccgctgcatctccatggtgtaaaatcaccattgaaggacctcattgaagctcaaagatccagcctccatagaagccccacaagcaagcttcca

SEQ ID NO: 36366 - DNA, 402 bp, Glycine max
  unsure at all n locations
agatgagctgctccaagggatatcaaagggggtacatangtgnaaactcttaagccncatcgncctcgaggaaccctccatctctggcaatccataccccacaacacaaccacatgaaactcgatgttccgcacttcggcggcatggatccttttggttggatcttcaaaataacacaattctttgagtatcatgaaaccccagaccatgatcatctcaccatagcttccatctacatggaaggacttacactcgctggttccaatggatgatgcaaaatggccagatttcctcctggttaggtcttcttcaagccttggacgcccgttttgcagtgtctcaatatgaggatcctacaagtatttgtttaaactcactcacaaaggcactgtaacagaatat

SEQ ID NO: 36367 - DNA, 327 bp, Glycine max
  unsure at all n locations
gaggcccgttgagacgactgcancccccancacaaccgccgagaangaaaaggagaagagcaaattgttaacgccagcgaaaccgggggggaagcgagcaccccnccacccggcgggcgaaaaaagcgcaacgaaggacacaaacacccccggaacagacaacccgagcggaccccgaaaccaagcaagaaccccaaaagcccggcgaacccggacgaaacgaaaaggaggcccaacgccacacccacaagaaagcgccgcagcgcagaccgaaaggaaaaccacccgggcagcggaaacacaccgacgcgacgcaaaggaggacgc

SEQ ID NO: 36368 - DNA, 278 bp, Glycine max
ggtctgattgatcacctaaaacggcagccccaagcaaagttctttggaccaacggggggatacaacaccccaacagggggacggacagaataccacacaaccgggcaggacggcccaaccgaaccgaggatcacacctgccgccgagaaggagcgcgacacgaaacatcccccagcaacaaaacgcgcaagagacacacagcggaaacaaaagcacgccccatagaagaccaaaacaggggacccaccgacgaggagaccggacaccgacaaagagac

SEQ ID NO: 36369 - DNA, 461 bp, Glycine max
  unsure at all n locations
gcgccctcccttgattcnattgctttgcannnctcgcagattctgtaaagcgactatgcggcatgcaagcttgtaagcaaatgaacaaggttaaagttgattatcctgcgcagagcacaggctggtgcgtatattatccatcattcccgcctttatcatagcggtcaatagtgataacctttgcttacttcttctgtagtggaatacggattgcgaaaaggttttgctcttttcttttcggactaaaaacatgtcaccttacttgagaactgtccctgcaaagatatatgtacatatacatacatacatatataaataagacagaagagaaacaagcgattctatatatatagtagcagccgtaaagcggcaggagggcataaaagataaagatccatccatcgcgaaaaaaacgacaaagacgttgtgcggaaagagtaaagaaagacacttgacatacc

SEQ ID NO: 36370 - DNA, 661 bp, Glycine max
  unsure at all n locations
ccccccccaccaaaccctgcaaggaataataaaaagaagaatntaaatacttttctcntncnncnnnnnaagggcgnggtttgaatcgagacaatgcnannccngananatanaaacacaagcccgggcggcgnacaangacacactcaacacgcaaactctgggattctcaagcgngaggacagagacacggcgaggcgggcantactgcaccacaaaagactccgagagacntnctctgaccaggaacaacacataaaacatgcgagaacgtacatgcacatggcagaagacagtactgagagggacacttgaagtaaacactgaggcagggccgcagtcgctccgcaagataacacgacaaccactctctcgacgggggaagaggacgagatcggaacatgtacacgaaccgggcagcacaaaatacaagcagtcgggcaacgacaagcagcacaacaacgccgatagaagttcattgtgtagtccagaaggacctcagaacgcaagattgatggcggcgtgacgcangactagacccaagcgcagcacaagacactcatcacgcggaccttggataatgtatcactggatcaaagagggatcacatagaacaggcccaagtacgaggaaacaagaccggacggaccgacagacaacg

SEQ ID NO: 36371 - DNA, 285 bp, Glycine max
agcttttatgcctcagatcttcttcattattggagtctttcgcttcttgaagatcagtggtagcataatagagaaggaagatagatgattggagatgccacttcaaggagaagatgattcaagaacaagctccccaccataggaagccattgattaaagcttgtatgtacgaaaagatgagtggagggagaaaaagaaaaagagcaagaaaatttttgccctaatgaggtctaaaactttgagtggaattctgaaatggataaaagtgaaaaaaaaggcccccca

SEQ ID NO: 36372 - DNA, 445 bp, Glycine max
tacaatcatttctataaagaatattattggaagcatgtcttaatttgcttacgaaatccataccttgtgggtcgttgaatctcagttgagtcagttctgcaatctcactcagattcttgttctaataagataaaaaaaatgaaaccaagagtggaaagggctttccacgtacgaatcagacacaagccgattccacgttcacaaaatcaccagtttcccaacctttttcttatcatcaattgtctctttttattctcacttccttaaatcaggaatagcaaagggaaagtggccatgcatatgcaagcacccacaatcagtcttaacactgcaaggtccccatcttcattagctgcagctgccaatgctggcctgcgaccgcacctcatccctatggctttaaagtcatctttcttatgtagttcccttaacctcttacttcatc

SEQ ID NO: 36373 - DNA, 355 bp, Glycine max
tggaagtggcggctacaagtacgaacgatgcccagggatgccaactatttggtgcaacaggaagagggaacattagatgctctgagcttggtcttccttgcctctggaaaattaactgtggggtcattcatattccaatagttccttatgatataagctaagtcaatgaccagccttatgttttcataggaggtaagagcatcagatccaactcccctcgatctacacaaggctgtgattaaagctgggaagcctaatcgagaagagttagactgagccataatagtcaattgtgcagagatcaaactaccaatgtgcatgtccatccttgtgattaagccatagaccaacctac

SEQ ID NO: 36374 - DNA, 261 bp, Glycine max
gcgcccctgatgagcatgcccttgaaagcggcaaaaaccggccggcagaataataaggacgaaacgggggagacggcaccccccccaaacccagccgccaaccggaaaaggacgaaaccgcaaaagcacaaacaagccaacgggcgaagagcccccggaaccaccagcaacggagcgacgaccggacgaagccacgaaacggccagcacacgacagcccgagaagggaccaaaccaaaaaagaacgagggggaaagcaaag

SEQ ID NO: 36375 - DNA, 625 bp, Glycine max
  unsure at all n locations
agagcgctacctttttgatttaatgctcatagcnannnacgngacactnatagaatacatcaagccttgcatggtagancacagaagttgacaataagtgaanaccaacatgttaccnnattgngtgtactgaancacnacaggcgccatgaaacatgggtgatcattgtgtatagactagtacatatgcgctcaccccacgctgagattgtgcctactcagaggctagataccacaccttacggaccaatgagcccattgacttatgtgctatatatctncgcgaggagagtcatctgatcttctcaatttaacgggtcaagagcgaaacactatgccactccaacatgtgacgacttctatgaatgcagatgncatcaactcaccccatctcctctatgtcttcactgtctcgggcagtatcgcattagtgcagaaagatcctcagtactatgcttcatcgcatcagtgaggtcgaaaagacgtgcgttnaagatctctattgtgtaactaccacatattaatagactacgcactgcttattgactctcgcgagcattcgtcatgacatcggagagcctagtcttgaacacttgcatcgtgggctattaaacacacattcgcg

SEQ ID NO: 36376 - DNA, 422 bp, Glycine max
  unsure at all n locations
tgtaaatatttattggtataatttgcctggccattttgctctattgtctttagaggttatttcctcgttgacatcttttgtcttgaatggaattgccatgacaggtttattgttactgtctttgatatttggtagttgatattgtgttgcgggaggtaattccgattggattaactcaccatccttcactttccaatttgttatgacatttgttgttggatcacctatgatgtcttgtttccaagggtaatctatatcctttctgatggcataagcatgaaaccaatcaaagaaaaggacattaattntgcctctttcgacaaattcgtagaacttgtcttggatttgttttctggttgtacccttgtaatgttggaaaaccatatcctttgaggttcattctccggagaataaaaatcttt

SEQ ID NO: 36377 - DNA, 467 bp, Glycine max
  unsure at all n locations
aggagtcanatctgatctctgnnanatcaagacctnganagaaaacgcagcgtgcnagctnagagncttacaccaagaagcgnaccttgcgtttttaanaagaaccccaccaaccggaccatgttgtattggtggggagccctcttgacggagactcaagcactgtatcgaggggaatctccactaaaggcctgcgcaacacaacaacataaagacttgcttagtaaataaggcaccttgaatctaagcaaaaaacaacactctactttaactcaacttcacgatattctacttttttttactggcttcacgatattgtactagaaacaggtaaacttcatgctaaaaaactaatctcaagaacgaattgtcttttactttttaaataccacttatgcgaatgtcgatcagaaaacaagacactcataaatggagaaaaaaatgtgatgaccatttatcaagcaccg

SEQ ID NO: 36378 - DNA, 242 bp, Glycine max
catggccgggctaacctagaccaattgggccacctgcattcccacattccaggctggtagcctagagcatgaaggggagtgtgttgaaaagccacttaatcacggtcaacctagctcgccttagatacggcctcattgggggctgacattttttttatcagcgaaaatatataatcatattgaactgagttccacaggtaccaaggctacaatttaatacatcaagcaaaaggttccaatat

SEQ ID NO: 36379 - DNA, 313 bp, Glycine max
ggaacaacacaggggagtttcaagaaatgaagagcccccggttgatgcatggacggagatgaaaaagatcatgaggaagcggcatgtgccggctactaactcacgggacttgaaattcaagctccaaaaactaacccaacgcaactatggggttgaggagtattttaaggaaatggatgtgctcatgattcaagcaaatattgaagaaaatgaggaggtaaatacggctcgattgcttaatgggttgactaacgatatctgcgatacctgcacgagcttgttgaaaaggatgatttgcttcccaaagcactcc

SEQ ID NO: 36380 - DNA, 283 bp, Glycine max
ccacaagcacaccgggggttgaaacctgctaccccacaacacaggcgcaatatctgaaccgttgaaaaagatgagagtcgctaggaaccccacattcaaaatcctgtatcagtcaatatatgctgaatatacaacatgcaaacacgtaacgccttaccggaatggaatatagcttttcccaaaacctataccatcatgacaaaaaagcggccggccaagatttagaggagcattaagacacattatcatctaaagaacagatcaactccttttcaggccgcta

SEQ ID NO: 36381 - DNA, 122 bp, Glycine max
tattgagtttagggtacaaaacaactagtatttaggaaggagcactccattcattcttatcccaggaaacaatactcacttagtccgtatatataaatgtccttgcatgacgtaccgcaaac

SEQ ID NO: 36382 - DNA, 458 bp, Glycine max
  unsure at all n locations
aggaataagttgaaactgaggactttgcannacgcgacactatagaaactcacgcggccaaaatgatcggccaaacaagactttttcttttagttcccacgcaccacacgaggacacggggaaatttgcagccaccactgaccccctcggaccacaatggcaaggacacccgaggagacagaagattcagagtcccttatcaaagctcagacggaagaagcccccacgaccatggtatgacgctcggactatcaagaagaagaagaagagggactcccctccctgccttgaaaaactcacgatcacccctgctcaacgagtggaccaaccctgatcttctcagacgagtgtacacataacgcctctaggctgggcccacacgaaacatgggtcggcacactgccgaacagaacaaagcgacacaccgaaggaccatatagggcgccaaggcggaaccc

SEQ ID NO: 36383 - DNA, 332 bp, Glycine max
  unsure at all n locations
caattccacagacngccctggggaatctaaagatgtaactctccacacggttcttgaatttctcaaatcggtcctaagtttttctaaaagttataactcttctaaatggttgtcttgaccagacatgaagagtctataaaaacaaggctttgttttgcattacaattatcttgaacacttattcatacaatcctttacaagccttaaatctctttgaacttcttcttcttatttgaaccaaaagccttctgaagttttctggtctcccaaagcttgaaaacctgtgctattcatcttttcattctcttccccctttgccaaaaagaattctc

SEQ ID NO: 36384 - DNA, 358 bp, Glycine max
ttataaaaagacttgcttcttcaagccgcggtttttacctggcaaccactagcactcggctgggattgtgttcttattttccttgcataaacgtacatcttctaagctccattttcttgaagaattatcgtcctataatcacgtaagtgatcttttaacactactatctttactatgaatattatgacgaaacttagtaattaaagatgattgttttacaaatgtatatcaatgttctaacactaaactcttgatatatcaaattcacacgaaaatatatatttcggattctgaaaaaattcatacttttgttgaaatcttactgctattaactcaataacattatcttactttcctt

SEQ ID NO: 36385 - DNA, 485 bp, Glycine max
  unsure at all n locations
ccgcccacaagcgaaaaaggatnttntttcaanaatcaaaggtgagaagcaangnaacncanacaacgaaaaggagggggtggatgagcatgcacaccancnnanaaannnaagacacggcaaacaaaagggaaacaaagaagagaatattatttaaaacgaaagggacgacggaggagggaggggacgagaaaacaaacaggagcaaaaaggacaaaaggaagccacaaacaagacgagagacaggccgaaaaacaaaaaggtgggaggcggacaagagacggaacagcgagggcaaaacaaagaacaggggaagagcccgacagcggtcaaaggaagagaaaccagacacgcgaatggaagggaccggaggaaagaaagaaagaccggagccaggagcggagaagcggaacacggggaacaggggacgaaagcaaaggcacggggccgaaggaaagacaaactaaaaggaagaaagaaaaacc

SEQ ID NO: 36386 - DNA, 435 bp, Glycine max
  unsure at all n locations
ggcctcanagaggtccaggaaggacaaggcggccgaaggaacatgttcttccccggagtacgacagtcaccgctttaggagcgttgtacaccagcagcgctttgaagccatcaagggatggtcgtttctccgggagcgacgcgtccagctcagggacgacgagtatactgattttcaggaggaaatagggcgccggcggtgggcaccactggttactcctatggccaagtttgatccagaaatagtccttgaattttatgctaatgcttggccaacagaggagggcgtgcgtgacatgagatcctgggttaggggtcagtggatcccgttcgatgccgacgctatcagccagctcctgggatatccgatggtgttggaagagggccaggaatgcgagtatggccagaggaggaaccggtctgatgggttcgatga

SEQ ID NO: 36387 - DNA, 515 bp, Glycine max
  unsure at all n locations
gcctcgcccacaccagcgtacgccacatngacgggaaggagagggagaaaacgatgaancaaagaanagaaaagatgttataaaccncccccaagcncgcaaaggctttgaagcataccagnacacgcganncatanaacgaccgcagcctgcaagcnagaaagaaacaccaaagncgaagttaacaatggacccacgcggaaaaacaaaagcgaaagcagaggacacaactgcccaactggccgacacgcccacgaatgataaagcaccgcggagaaacagcaggaccaccgaaacaaggggcacagacaggagaaagccgcgaacaaacacacaagcaaaccaaaacccctgcggcacgaccacgaacacaaaacacccacgcaacaagcgaaccagaagaggcgcgaaaacaccacaagacacgaaacgctcaaaacggcaagcaaccgcagcgacaacaagcagagcagggccccacacaagccaaacgcaaagcacacacaaagccaccc

SEQ ID NO: 36388 - DNA, 228 bp, Glycine max
accccttccactcgcatatagaatattattctagaggttctctctcacattgacgacaaataaaactcacctgttaagggaaaccatgcattaatatcactgatagattatcaacacttccgatttcaccacaaaaccctctataatgtacaatcacattcacaaaatgtcatacaattatctcgcgacataataccataatcacatctctactctgttacaaaacct

SEQ ID NO: 36389 - DNA, 240 bp, Glycine max
  unsure at all n locations
agctttgcataatgagaatctgttcctctaataaactctgcaacttancatctgaagtctgggagctttgagcagatggggttgttgatactggcgaagagggaacaccagctgctctggacctggttttccttgcccttggaaaattaactatttggtcattcacattccaacatttgcttttaatataggccaagataatgaccagcctcatgctcttgttagctgtaagagcatcag

SEQ ID NO: 36390 - DNA, 461 bp, Glycine max
acctatagaaactcaagcttgagcttgccctccattatgagcatggaggagtttgtctcatttgtggcctggccaggagaccagtcttctggctctatagggggtggggcctccacaacccaggagcctgtgactaaggagcctgcagcagaggaagagaccactccagctcagactcctcagccatctccaccatctgaacctgctcctgacgagactcaaccatcatcagcactggatcttaatgaagaccagccacaggaggagcaggacgtttaattttttttttttgcattatgaacactttagttttatttcagttattttatgctttatgtcatttaaatttcagcttttatatttcagtagcatagttgtttgtttgcttgaacaaaaagcttgattgaacagtgaattgattgaacattgcatgcagtggattgtttggtatggaatgagtg

SEQ ID NO: 36391 - DNA, 491 bp, Glycine max
  unsure at all n locations
ccccacaccgcaaacgacgcaggaaaaggataaanatgangttaaagggagatagagacgaaaacaacaaaaannntnnaannccaacagcacgccacntgatgcagcatagaagacccgagannccaaaacgaccgcggcagcaacgngcacaaaagaaacaaagccgttagcacaagcagcgcgcccgaacggggaaaaccacagccaacccccacccccagggcggcccacagaaaaaccaaggaccaccgcacaagccgggagcgaaacggaggcaacaagacggggcacaagaaccgcaaagaacaccagcgggagcagcgaggaacgaacagcgaaggagaagaaagcccggacccgagcaggaaccacgaaccgcgaggaggaaaacacccaggagggggggaagccacaggcgggggaggagcgcgacaccacaaaacggacaacggaacacgcgaggagaagaacaccccgcaaggaacgac

SEQ ID NO: 36392 - DNA, 308 bp, Glycine max
ctttatatacaataaacaccctctcataatgcgaaacaaaatgcggacacatatgtacaacaatgctagtcttccagtgttatatataatggagatgtttctaatgaaaaaagtcttaaaatgacaaattacaaaaaatgcttttaatcgtcagattataattaaaaacaatcaagggctgagattaagaaccccgaaattgattttaactgttagattataattaaaaagaatcaagggttgagattaaaaattgatgcttttaatctcaatccttgattccttttagatataattccgcgacagtt

SEQ ID NO: 36393 - DNA, 322 bp, Glycine max
  unsure at all n locations
aggggaacttgaacgagcattgcacnctccgnaaaacnggccncggaacaagccaaagcgaaacattcctccccccaacaaccacggggggggagagcaaaccccccaccaacagcgcaaaaccaaaaacgagcaacaacacgaagccagccaggcgacccagaaacgaagaacgaacacgcaacacacacacccacaccaaagacaccccaaagacaccccaaagagacgacggcgaaacaacccgagcaaacgcaaagccaggaaaagcaaacaaaggcaacccaaagaaacagaacagaggccaggagcacaaggaacc

SEQ ID NO: 36394 - DNA, 135 bp, Glycine max
cacacgtactgccaaggtgtattagttacttacatcacacacatatccttggctaaattcacatacatgcatactcaaagcattttgggggaccaaaaattgcacatgtgcacatctaggtattcataataccta

SEQ ID NO: 36395 - DNA, 484 bp, Glycine max
  unsure at all n locations
ccgcccccctttggatttgatgcacatggcannancncanccatanagaacacaagcccggngcgcagancccacgagcaggacgaggcaccattttaattaccctcgaaggcaaagacgaccggacacgggaggattatacgaaaacccctctcgcaagaccagaggaaactcacgcagataatgacagatcacccaaaggagaccgaagactcaagccgagaaccctctaggaagaccaggcctagactaatcacgaagcatggaacaacgagaacaaagccgaaactaaacacgcagatccctcgagagagactaacgggcaaacccgcatggaccagagggtaaagcagcaagacacacgccgatgcgaaagggacgcaactatgcacacgaacgggcggagcggaccacaggcacaccaacagaacgcacggacgaggcatgaacacaagaaccaagcaaggcagggacgcaanacccg

SEQ ID NO: 36396 - DNA, 344 bp, Glycine max
  unsure at all n locations
aaagcccaccctaacgcatacaacaccttatcataagtagaataattaagggtaagaccacttaacttttcactaaaataagcaattggatgaccttcttgcatcaacacagccccaatcccaacatttgaagcatcacactcaatttaaaaagattttagaaagtctggcaatgcaagtatgggggcattagctagctttagcttaagaacatagaaatcttcttctagtttatctacacatctcacaccaacatttttttagcacttcattgagaggtgctgccaatgtgctataatnctacccaaatcgcctataaaaccttgctgaaccatgaaaactcc

SEQ ID NO: 36397 - DNA, 358 bp, Glycine max
agcttttatattttatatgcaaggaagcatgacttatgcctaggaatctaaattttggttttgaatgtaaaaaggcatgaatattaggacatgtttgagaggttttattagaatttaaatttggctgccccatgaggaataccttgcacctacgtagcatggaaaatacctttcaacggtatgtatatatgtgaatgtatatggcataaaaataccttgcaaagtgtgaatgaatagcaaaaaatgcctttcaaaatatgtatatttgtggataggtagcgtaaaaatgcctttcaaaatatgtatatctgtggataggtagcataaggagctctctttttttttaaaaaaatgtacc

SEQ ID NO: 36398 - DNA, 207 bp, Glycine max
ttccataccactaaacttaaggtcgataatggaacgagatgataaaagattggagtaccctttctgctggacgaccgaataatacaatggggaagacgacaatgaggatggaatgggtgctaaggatgccctaaaggctcctgaccgacgagcacttgaagccgtagcggaggcggaaaaaccctttcatttcttagacaattctgc

SEQ ID NO: 36399 - DNA, 352 bp, Glycine max
agctttttaattctcatgactgctttaaatagctacataatttgggattcctatgaccaagaacatcatgacaattgggattcataatttggcctgtttgttgaatgttgggcatgccataggtccttggaccaaattttgatgactatctttaatggtctggtaaaagaggctaaattttttgcaacatgcaatctacgttagtgcatttggttgaaggtaacacatatttaaggttttttgggctcagcagctgatttggaataagaataggtgtttcacttctgtttggtgcaaaagcaataaatcaagggtatccctaacagagagactgagagatgaggtaacttta

SEQ ID NO: 36400 - DNA, 425 bp, Glycine max
  unsure at all n locations
acactttagaaactcaacctggatgttcttagattggatatcttgcccaacagacangttcttctatatttgaaaaaccagacccgaggagggttcaagatgtcgagagtccgtctttcatgggcacacacacagactgcatgcgcaataatttggaagaaccaaaacaagataactctttcatggtaatggctggaggtataatatgacttatgtttttgcgtttttgctcaatgccctgtgttccattattgtagtttgcaacatcacaggttaaaattttaatctagcatttggtattaaagcattaatagcctctgccttgttcatttttggttttcagtatttatttgatttaacttccgttatggtatctagagcctcatttgttataaataagatgacaaatctcttatttctggtcg

SEQ ID NO: 36401 - DNA, 350 bp, Glycine max
  unsure at all n locations
agcnttaggaaaaccaagccaaagagctggctgcattatgctataacagtagcaatggaaatgaaaagagcaatttggacagtttggtgaaggccatatctggagtatctgttgctagtcaacctgaacatacaaaggtcagcaaggccaaacagaggcgagagaaaagagctcaacaagaagcagaaagggagcagagaatccaatcagagcagagtgacattataagtgatcgtatgattgagaacgagaaattggaaaagaagttgaagcctcttggtttgactgtttgtgaaataaagcctgatgggcactgcctctatagagccgtggaggatcagctggccctc

SEQ ID NO: 36402 - DNA, 399 bp, Glycine max
  unsure at all n locations
tgaccaatcccgacccaacccgggcatagncttttgngtttacctatgacgtacctaaacaggtgagctcctgtcagtcaaccaataaaagaacaaagtccacaaagcaaggaggcttgtgtggcggctggccaactatgaatcttgagtggtatctggaatttggcctctgataatcgattaccaagggtgtgtaatcgattgcaaggcttaaaaatggagacaggaagttaagatggcctctggtaatcgattaccaagggtgtgtaatcgattacaaggcttaaaaatggagaaaggatgttaaggtggcctctggtaatcgattaccaatgctgtgtaatcgattacacagagtaacaagacactggtaatcgattactagttatgtgtaatcga

SEQ ID NO: 36403 - DNA, 348 bp, Glycine max
agctttttaccaaaataaaaattataaactgaaatttaaaagctgaaacataaagataaatataaagactgaaacataaacataaatctaaattataaaatgtagtaaagacgagataataataaaattgttcaaaaagtatggaaataaaaatcctgatcctgtcaatgatcctatgcatgctcattcaggtccagtgctggtgcagatgatggatcctaagaaagaggcaggtccaacactggtgcagatggcttaagctcatgctgaggatatggctctagtactacaagatcctcctgaacaataactgaatcagtctcaaaaatgaaagactcaggtggagtg

SEQ ID NO: 36404 - DNA, 414 bp, Glycine max
  unsure at all n locations
gacacttagaaactcacccttctctctgataccatttgctctcaggncatatatctatgagtgnagnctataaatcctgtcagcaggccgatgctacagttactgggtatttcttccatgttcattgcatcgtaagttttaacaaactattcatgattttacaaatgttgtgtgtttgttctcaccctaagaagtactgaatcgcttctccctcttggattcgcattgagatcttgtcaaagatagtaaatgcttagttattgactattgctcacaaaaatgattattctttggggtataaccacatggtctttttgactctcatgatatctatctattccttattaatattgcaaaggctagcctcaaacaatcatgttgcactgctgatctgctaatgcacattgttaatat

SEQ ID NO: 36405 - DNA, 332 bp, Glycine max
ttgcttttaatcaccatcgtacctccaaacctatatacatccactcactctaacaacaatctcacagcctgtactttatttgtatttactaataacttatctttaaaattaattaagtctaatcatgagaaaattaaaaaatcttaatcaagtgaatttattgctattttgtgattgaattttaaatatcaatttaactaatacctacactatgttgcataaagataatgtaaatatgtactgacttatataggcaaacaatgcaatttgtgtgatgattaaagtgtgattaatagtaattaatcataatacctttgtggaggattgagttc

SEQ ID NO: 36406 - DNA, 386 bp, Glycine max
aaagttattggcgggggaatttgctcagaggttcaacattcaatttcgagcgtctcgttatattacaggactcaatcagacatccgagtaaaaagttattgtcgtttgaattggctcagagcttcaacattcaatttcgagcgtctcgatatatgacaggacgcaatcagacatccgagtaaaaagttattgtcgttggaattagctcagaggttctacattcaatttcgagcgtctcattatattacaggactcaatgagacatctgactaatacgttattgtcgtttgaattggctcagaacttctacattcaattacgagcgtctcgatatatgacatgactcaatcagacatccgagtaaaagttattgtcgtatgaattcg

SEQ ID NO: 36407 - DNA, 341 bp, Glycine max
agctttctctaaatttacattgatgtttgtatttatgggaggaggttgtatgtcatttttgttttaagagtagtgtcccactggtaaaactaactttccaaatgtttgccttcgcaggaaatggccccgaggaagcttgcctcaaagaggtccaggaaggacaaggcagccgaaggaactagttccgctccggagtatgatagtcaccgctttaggagtgctgtacaccagcagcgcttcgaggccatcaagggatggtcgtttctccgggagcgacgcgtccagctcagggacgacgagtatactgatttccatgaggaaatatggcgccggcggtgggc

SEQ ID NO: 36408 - DNA, 448 bp, Glycine max
  unsure at all n locations
tcttgcgtagccgctcttggtgctcagaacatcccanaaacttatccctcttattactagctattttgaattctttagttcctgaatgtacaactttcaaattgttgttcgttcccctctttgttttatgcaaaaaatgaaatcaatatcaaacaaaacatgcatacaattgtcatcgttattgctacttgaaccataaggaataccatctaaagaagtacttcaaaacgtttatttattttttttggtattttttgaattacaatttgacttcaatatctaattttttaatgtacttaggtggaggatgttgacgaagagaacgagaaggaagaaagtaatttaaagaagattaaggaagtgtcacatttttttttcctcagcaaggaagtgtcacatgaatgctcgttggtgaacaagcataaggccatttggatgacagagcctt

SEQ ID NO: 36409 - DNA, 416 bp, Glycine max
  unsure at all n locations
ccacccacccaagaaacggaatttnntaatntaaaacaagggataggaaaaagagagcaaaaannnaggggcgggacgagtgaatcagcatgcaaacaagcgacacgcccgggaccgaacaagaacgaagaggaactttatctaaccanaacacacccaaacaggacggcaaacacgacaaaaaacgaagacggaaaacgaggaaaaccaacaacaacaacacaacagcgaagcaaggaaatagaaacccaagagaaacaaaccgcagaagaacagaagacaagacaagaaagaaacaaaaaagaaggaaaaagatgaaccgaacaaacacaccgccacaagagcgaaccagaacaaccgaaaaaaaaccgcaaccaagaacgagaagaacggcgagacgaacaaccagaggggcg

SEQ ID NO: 36410 - DNA, 445 bp, Glycine max
  unsure at all n locations
cgtggggcatatgtactttaagtgagagagaagatatttaaatantggaataataattaatattacgagtaaataacatatacaaagatgattaatttttacataatcaatcacatattatcatataatgtaaattgattgatagtaataataaaaatataaaattcatattaattatgatttaagttctaaacattatagatgatatgataaaaaaaatgtgtataaaaatgagaaattaagcaataatgagagaaaataaaattgaataatgaaagagagaaagagtgtgaccgtcacagcttccaatagattggtgttgtcgtgcaagtacttgaggacccatgttagaacactcgctgtggtgtcatgtgcagcaaagatgacaccaatgagattatcaacaacttgagaatctgtgtgctgctgatagtacatcttgttc

SEQ ID NO: 36411 - DNA, 186 bp, Glycine max
  unsure at all n locations
agtnttatggaggacaanacaacgccgctctccgggatcttaaggaaaaatcactccacttacggtgaccgatcctccgttaacatcgagactgcacttcatccaaaatccgaccacggttcccaatgcgtgtatgtctacacaacgtgacctacttgatactcctaccagagaaatcacccctta

SEQ ID NO: 36412 - DNA, 295 bp, Glycine max
cattccaactactatacgtgaaagctcggagagactaagtgttaaacaatactcgggcttctgagagatagggggagtccaatgccgtgcctgaaatggaatttagaacactcggataagcggcaggccagaatatatatatagtaatcgagatgtgacaaatggtaatcataactcatgtgttaaggaaaactggacggaactcaaagcgaaggaactacttcaaggaaacagattctacatcgatcatacgcgatacataagggattctattagcactatctgccctccttgt

SEQ ID NO: 36413 - DNA, 420 bp, Glycine max
  unsure at all n locations
ttcacaacaaagagaagagattaatgaatgatcgaaganatcattttttgtggatgncncctccacctggggaacgtgacaatcactaacacactcatctcatgctctcatgatggcttcctctttaagctcagttctctgccaatctttgcacaacaaaagctctcaaaactctctggaacttggacctttatctctctagaaatctctaaacatgaaaaatctttgagaatttcctaaactccctctccatttctgatttcaggcttaaatatgtggccttgttggtgcttgtgcgcttagcgcaagtctggctcgcttagtgcccataagtgaatatcggcttaacgctcgtcttctcgcttagccgaatcatgcaggtggtgcgtatagtacgatgagtccttgcttacacgtgtg

SEQ ID NO: 36414 - DNA, 435 bp, Glycine max
  unsure at all n locations
gagaggatgcttcantggaggaaaagagagagggagagaaatagagtttggggagcacgaaatcgaaggaggaaaagatgtatagaagtggaactctgacgtatgtctcacaagactctcattcatcaaagttacaacaagtgttacacatgcttctatttatagactaggtagcttccttgagaagctttcttgagaaaacttccttgagaagcttctttgagaaaacttccttgagaagctagagcttagctacacacacccctctcataactaagctcacctccttgagaagcttccttaagaagattcaagctagagcttagctacacaccccctataatagctaaactcactctcatgactaaaaacatgagaataatataaaacagagtccttattacagagacaactcataatgccccgaaatacaac

SEQ ID NO: 36415 - DNA, 622 bp, Glycine max
  unsure at all n locations
cgcgcacacgctctttgaaatcgatgagcnatagcnannancgngacacnatagaggacatcnagcctcgcgtcctctcttacancctgcagtatgtagaagcaagatttttcacagtagtatggnaggcnngagcacaagccgcggaaccgggagatcttcttatagaggaacgctgctctcactcctccgtctcggcagacacaaagagctcggcaagttttgcaactagcgctgatatgaatcatagcttgtgtcactcggactcacaacaccaactcctttcggtgaatctctggtgcacgctcgcgcgtgtacagaaaagtttctcatagcaacagagaacatcgatataacagggagacgcacctcactcttgactctctactaaagtgcatgattttcgaaagtaaaagtatgctagtctagcacccgtggagcatgtctgtgacgacatgaaacgtccatgccaacgtgagcggccagtgcaccatatgggagaaaaaccagagagacacacgtgagacacttagagcggtggtgcgcacacttggagaacagagtcacttatacctntcgactctactcaggtccaaacgagcgtatccgtgcatctcacccg

SEQ ID NO: 36416 - DNA, 424 bp, Glycine max
  unsure at all n locations
taagcagtgatcaaacttgctctttggaactggctttttgaatttatcagcaggatngagcagagagctgatgttattaactgagattcttctttctgaccgactgaagcgatatctaacatctatatgcttgattctatcatgatgaacatgatccttggctaagcatatctttcaggaggatatgtgaccctttttggtctttgattgattccaaaattgagctgtggaggatcaggttcagcagccaaatgagacaatagcattggaatcttctgatttctcaccttcttgaagaactactggagatgttacagaatgaccctcttttttctagtctttggtgatagattctacatccttttctcgatgagagtggcagctgtatgtaccagcaatttgaacctcaagcttgggatgaaac

SEQ ID NO: 36417 - DNA, 355 bp, Glycine max
agctttttagaatatcaatctttataagcaaagaggaaaaatctatcatgacaaaaagttgtcaaaaaggaattttcagcttggccaacaagtattgttatttaattctagattaacattgcttccaagtaagctgaagtgcaagtggtttgaccattcttcatcaaaaaagttatgccacatggagcaatgatattggaggacccaaccaccaaaaggacatggactgtgaatggcattagaatcaaacactacttaggtggagatttcgagaggctaaccactgttgtccaactgcaagaagcttgaacccaacaaggacatccatctattaagacgttaaagaagcgctcct

SEQ ID NO: 36418 - DNA, 407 bp, Glycine max
ttgctatttcaagcttgaaccctaccagcagcattcattaggttctaaaatcccaaatcccaatagcgtctaattatagctcacatatctttatttcttgttgtcaaaactagagttattttggatgtaaaagctaaataccttggttgtgtagtcaaagtagttaaataaccccacattataatgcaatacttgatccctatatgttatattagtacagcaaagcagctgctacaccaaagcaaatagtttctatataacatgctcaaaactaaagtactaaaatcaaaactggacaaacagatatagtaagaattttcttctataaattttaatgtacattctgtaacatgctacatatgaatattccaaagtgaacaaatgtgtggcactcttaatggggcaaa

SEQ ID NO: 36419 - DNA, 249 bp, Glycine max
agcccgttgcctttcacatagcataggtttttcatgggtgatcaacctaggctgtggttgcaaatttgagaatctctccaataacaaaatatgaaccaagtagtaaaagggtgaccaaagagttacctcttatcatcaaccaaactaactactgctttcttcaacagacccacatcattttggatgtcggcttaaaatatcggccgcaaagctgattatctacatcagggaaaacaaacttgctcaccc

SEQ ID NO: 36420 - DNA, 406 bp, Glycine max
  unsure at all n locations
aaatgtttaattatacagtttatccaaatacactgatattttatcacattnncnctgtagtgggtgtagtgagtcaaatttctgaatattcctatgactcggggtcatgtaattcgagttttatatgtaaactgtcaccatacctcatggaaaaatcactttcaaccaagttacgtgccttggcatcatgctggaactttgattttgtaagtacatatccaaattttgaataacaattgtgatgacattttggtcctttctttattgtgacataaagagtctgaatatacaatacttgcagttacagttctccgactcttttcattctttccatctaccaaacttcatataacaagtagactctctattgcttcacctcttcattttcattcttcttgttcttcac

SEQ ID NO: 36421 - DNA, 346 bp, Glycine max
  unsure at all n locations
agcttgacttaacttgnnaaaataatccgagtggagtttcatatttgagtttgtctattcaattaaatatataaatttgatcgaatattttatatttaacccgattcatttacatcgctattcaattatatgtaaatctatctattagatttttatcacgttaatattaaaagaattattattactagaaaattttaaaaaatattaaaagggagtacaattatataaagtgtttatcagatcaaattgattcgataaatctgataattcaaatcaaactaattaaattagtttgggttgattggttaattggttcgttttactttaattatgaaccaaactgatt

SEQ ID NO: 36422 - DNA, 361 bp, Glycine max
  unsure at all n locations
ttgcntttcggcattgcaaacaaaatacggcttcgtggcactgaaattcctgactctcgaattgttcaaaaaatacttgtaacaattccagaaaaatatgaagccacattgacttccttggagaactcaaaagatctttctactatcaccttggcagagcttttgaccgcacttcaggctccggaacaaagaagactcatgagacaagaaggtactactgaaggggctttggtagctaaatcactggacaaaaaaaagaagggcaagtcacgaagtttcaaccacaaaaatggtagcaaatcctctcatgattttccatcatgtccttttggtaaaaaaaacaatcatctacagacgaagt

SEQ ID NO: 36423 - DNA, 370 bp, Glycine max
  unsure at all n locations
ccgccgccgacaaaaaaggaagtagaaagttaaaaaacaaaagaaaaagaaaagagccaaaaaaaacggccagagacgttgatcgtgctcaccaggcancggccgggaggaaacgaacgaggggacctgtttaggacccagccagcgggggcaacgacaagccacgaaaccgcgcaaaaaaaccaacacaaaaacgacgcgcggcgaaaacaaaaagaaccagcgggacgcacaagggaaggggcaaagacgaaaaaagcccacaacgcagaggaaggccgaaacacaaggaaaaagacgagcagaaaaggaaagccgagacagaaacgggcgggaacggggaaaacgcagaaaaaaaaggagcagccac

SEQ ID NO: 36424 - DNA, 437 bp, Glycine max
  unsure at all n locations
tattggagggagaatattcaatccgaatcatggtacnttttgtaacgaagaatctttttgcggcttttagatgaggacaggtacgagcctccataaagcgacacacaactcccaccgcatatagaatatcgggcctcgtattggttagataccttaaactccccacaagactcttgaagaccgtggagtctaccttctctccttcatcaaactttgataacttcaagccaccttccataggtgtgttcacgggattgcaatcaagcatattaaatttcttcaacacttcttttgtgtagcttccttgtgagacaaagatcccattctccgtttgcttcacttccattcccaagtaatatgacatgagtcccatatctgtcatatcaaattcacgagacatggactccttgaagtcttcaaacaaatttgggttattg

SEQ ID NO: 36425 - DNA, 371 bp, Glycine max
agcttgtgcttttctattgagtgacttgatgcaattaagtgtttttctctatttaagattgtttctgtgttctatgctgagggcaattgtaccacacaccgattcctcatgtgaatggactaattctatttaaacctcgttctcagatgtctcgtcgaacttaacctaaacgaattgcattacgattacaacatattaaaaactaaaaccctacactctgtgtccagtaatgcagttatctagccctgctctatctaattctaaggattccaaacattttccaatgctaaaaatcctaactttacacacaaatggatgatcagaccaaaagcatgcaagaattaagtgcagataggagcaatgaacacatc

SEQ ID NO: 36426 - DNA, 427 bp, Glycine max
  unsure at all n locations
gaattgtataatatatatatatatccatgnggttttatacgattnttttacatacgcgttaattttttatatatgatacccttacatgaatggtcaaacctcaaattgatttttttttttgtatgaataactctcatggcttggattttctgattttagttataataattaacaatatgtgtgtgagtgttagatagatataagagttattattcaaatgttttaatattctaaacggatttgcagcggtaaaaatgttgatacgtgtcataccctgatttcgtccagggattatcgttcgttgatcttttgatccttgctagtcgacttacggtactgatcgccagttacaatgcgaaatagatgatcattcagtgttttgattaagaatgcaaaatataccaaaataggggcaaaagggtctttt

SEQ ID NO: 36427 - DNA, 199 bp, Glycine max
  unsure at all n locations
agcnttgataatcaatttcgagcgtctcgatatattacgggactcagtcagacaaccaagtgaaaagttattgtcgtttgaatttgctcagagcttcgatattccatttcgagcgtctcgatatattacgagactcaatcagaccaccgagtaaaaagttattgtcgtttgaatttgctcagagcttcggcattcaagt

SEQ ID NO: 36428 - DNA, 443 bp, Glycine max
  unsure at all n locations
gagcatatgcaaacgacaatcacttttttacttggatgtcatantgagtctcgtaatatgtcgagacgcgtcgaaattgaagaccgatgccctgagcaaattcgaacgacaataactttttactcggatgtctgactgagtcccgtaatatatcaagacgctcgaaattgattatcgaagctctgagcaaattcaaacgacaataactttttacttggatgtctgattgagtcccgtaatatatcgagatgctcgaaatggaataccgaagctctgagcaaattcaaacgacaataattttttactcgtatgttcgattgagtcccgtaatatatcgaaacgctcgaaattgaatgtcgaaactctgagcaaattcaaacgacaacaactatttactcggatgtatgattgagtcatggaatatatcgagatgctagaaattg

SEQ ID NO: 36429 - DNA, 213 bp, Glycine max
gggtctgctactgaacaaggcgaactcgccccgggacctaacacggcctcttactcaatcctagcatatccaatacgagggagataactatcctgaatgcacaaatgctactcggattatcctgataagaatggccagaagggcacaaataaaagagcggaaacaagcttctaaaataagagcccgggacaaagttacccaggtaagaacccc

SEQ ID NO: 36430 - DNA, 431 bp, Glycine max
tgctaattctggtgtgcaagactatttataatccctaaagtcagaaatggatccagagatggaatgtgtcactattgaaatatgaatatgaaaaacgttgagaagaaagtttaaaagcagccaaatgggaatctataatagttcctacttgtgacttggttgaaaatgaaaacagaatgaacatagcatgtaaaagaaatttcaaaattgagaaatcaagaagatttatttattgttttggaaggaagaaagtttgggaagagggtatcaagttgtcctattccttaatcagagtaccggtgaaggccaaccagccccaataccttgtttgacaagggcaaggcaattcaatcttacctaccaaccttcacatggccatgtctagaaattcttgagccttacgcaaaatttttgtttgaggcataatctaa

SEQ ID NO: 36431 - DNA, 422 bp, Glycine max
  unsure at all n locations
ccgagagcatngctcatttgagcgttacagcctnttttnctttgttgcttaagaaaaangccatcgcgtcttctttctttcttccaaagtcatctctaacgtcccaagcactttctccatcacccacagccacgattagccaccacaaaccaccgttgttctccattgaaaccccacaccgaggggaacccttcaaccgtagtgaaattttccaacttggctagcgatttcggtagagaatgaaaccctaatctgacctttcattttcctttgaggtaaccatgattccatgtttgtttcagcttgtctttgcatcttttatgactttggaaccaccattgcatgttgtacgcttccttggtaaaaccaaaatgctctcagctctttcatgaagtaacatgggtgtttgacccagagcattg

SEQ ID NO: 36432 - DNA, 426 bp, Glycine max
  unsure at all n locations
ctgaaatngagggttggggatttgccctgnatntttctatttattactttccttaacacccttgtgttcattatgttcgataaataaaaatactttttttttttttgttatgtgcatgagagtttcaatgctagttgtcacacaaatgtattacacaaaagtacctatcacataaagagtggctatgcaattcagaatgcatcaagaagttttagattgtgtggctacattctttggaaccaaaggcattgcatggaaaaattactacatacccatatctaacgggaatttctatttacctgcttgccttttttgagggagatgtcaccacatgttatgcaggatggtggaagtagtcaatattgtatcatcatcatggattttcgcaagaatattactcggtgaaagagcagtctatgcaatgat

SEQ ID NO: 36433 - DNA, 347 bp, Glycine max
  unsure at all n locations
taccaaancacaaacctcatataatgtagaacctcatatttcatcaattaattctatttaatatattatactttctaaaatcagaaaaaatatgcgtatagcatttatctaatatttgagatgtttcatcaagattaaaatatcccataatttaacaattaaaatcatttgatttatattttataaaaattattaagtagaacatgtgtctaaaatgttctcctggtgcatcttcctaatgtgtctaaaattatatgcgtcaaacacaatggtgagtcattttgaagaggcaaatcttaatacagttttacaagtgttttgagtgttgctaggcgcaccactcacat

SEQ ID NO: 36434 - DNA, 371 bp, Glycine max
  unsure at all n locations
ggagagccaccgcgcggtggngtatgagggggacaaggacgagccaaagcgaaagcggaagccatgaatgatcgaaataaagctaattttaaaaaatgttcttcatatcccaaatcaacaaatcttgtttttgtgcaaaaacttacaaatggcatatcttgcatctcatttgttataagaactgtgttttccaggataaggaatagtgggggaatgatcggacgttctacagaagggaatggcctttatcttcttgagaagcaatgtatgtcggctatagaaaaaaactagtctcattcatgtcagagtctctacttccaacaaggaaaagatttttactctttcattatcagttaggacatccctcttct

SEQ ID NO: 36435 - DNA, 351 bp, Glycine max
  unsure at all n locations
agcntttacatttccaggcgtaaaaccaacttgagacttagtttgttctcatgtataccatctcctctctcttttatatatttagttgcttaaggcattgcagacaatgattattacattgtctatgcttttggcaaaagcatatatatataactcaagctatttggttagtagctagtaacagatactatatatgcagcttcagtagtattttgaattgcactttcttagtttctctgaaaattacattggttttagggtccaatgccatgtagttgattgcctacactgtcggttcattgtgctgagatatcaacacctatatttcttattcatttatcattgttatat

SEQ ID NO: 36436 - DNA, 406 bp, Glycine max
  unsure at all n locations
ggtcaagctgtctctctcctatttgtatatatatatgtnttttgaattaaataaaactaagcaactgagggaaaagtttctctcctcacatattcaaactttaagtgtatgcatagatctcctacaggtaatttagttcctctagacttggaaattgaagccacgttaagaaagaacaaagccgaaaggagaaggaaattgttgcaagacaggatagtagcatccattttagacgaagaagttcaatcttgtgattcagcatcatggagattattatttctattccacaaataaattgtgatttgtgtcgaagagagcattacaaggacaattgttatctctattccacgaataattctgggtggagacaggagtttaatccttaccatcattatgaagaagaaaa

SEQ ID NO: 36437 - DNA, 279 bp, Glycine max
  unsure at all n locations
agctttcctctttttgnccaggacagacaagggggcagattgaactaaacccgctccacactatgatagtcaccgctttatgagcgcggtacaccagcagcgcttcgaaaccatcaatgggtggtcgttacttcgggagcgacgcgttcagctcatggacgacgagtatactgatttccaaaaagaaatatggcgccggcggcgggcaccactggttactcccatggccgagtttgatccacaacttatgcttgagttttatgcctatgcttggccaac

SEQ ID NO: 36438 - DNA, 472 bp, Glycine max
  unsure at all n locations
agcagcgttcagttttattcttttgtacttgcancacttagaaatttgaccaagaggcaagagngnaaggaaagaaagaaanacaggacgctttttgcgttttctccaagcacncagnaacnggagagcggggcgagctcaacaaagccacaaccaggcaagaccgcnnanaancgccnggacagcgaggaacaaacagagccagcagcagaagaccgccnaagcggacaaaacnaaaccaggacccaaccaccgaccgcaaagagcaccncgcgcacgcgcagccgagaggaaagccacaggggcccgggacaacaaaagangangacncagagccacaacgacagacaccccagcagcgaacagaacgccaagagcagcaagccagaaagacccgagaaanancgcggaaagccaggaggagcccaaccgaaagggacnncgacaagaggagagcccgaacccaaacccg

SEQ ID NO: 36439 - DNA, 347 bp, Glycine max
  unsure at all n locations
agcnttancatgatatgcactctatctctcaagtgtctatgctattgtttactctcaaagcacccatgaaaactgtaacatcctagaaatttctacccggagttttcggaaacgatgtattttgaatgattatatatatataagtattattcagtgtatatgcaaatatatgttcttggtagaaataggagtagtgggggcaagatacgcgggttaggctaattaaggaagagaaatccataactgggaggttatgggttaattcttaagtaattagtctaaaaatcatcgttttgcatgcgacttaaaatttaacgaaaccaacctctgaaccacgctcggggttt

SEQ ID NO: 36440 - DNA, 243 bp, Glycine max
gttgccttacactcatcgttataccataagaatagtcacattatgttctaaggatgtgttgaatattcattctgcggattgaaatctagaaacatcttttcatgtatactagtctttctctccctatattatgaacattgaggctaatttaagcaacgaattcagttcataacatgttctaaaactattcttagatatgagctttgttagagaactctttcttcttttgtgatctctaatgta

SEQ ID NO: 36441 - DNA, 448 bp, Glycine max
  unsure at all n locations
agaggaggagannangtgaacactgatccttgtatacccaaggcattcgagctcggccccgggatccttaagcgactgcggcatgcaacttcgctttgcttaagcatcgaagcagtgtccttcaacacctcttttgaataaatcatcacctagaatcacataattgacaactctatcaattgtcgattgaggattcttcaagtattcaaataaaagtttacgccaatcatctaaagacaaagtaccaatgttgagaaccgcatattcatcaagtaacttatcttttatttaaatttctctttagatatcctatatcttgaagctatttgagctaactcatttgctctaacatttcaatctctatgcacatgtttgaaagcaatgtcattaaatctctttacaaatctacatgctcgagtaaaatatttcattaaattagaacttatgn

SEQ ID NO: 36442 - DNA, 321 bp, Glycine max
cgcgcataacagcggggatgccaatgactattaattttttttacttaaaatcccatttacactagtaacccaaaacacatactaataatgtaataaggacttgaattagcctttttcctctcttaatcaattcaaactattatactgtatccctatgtgtaaaagaaattttgatagtttgtaaagaaaaacgtaattaataataagcttttggtcataaacttgaaatacaattcatattttaaaaaatatttatgtgtatgatgaattgtaagtatgatataacgtgatatattaataaaatatatatgataaatataa

SEQ ID NO: 36443 - DNA, 816 bp, Glycine max
  unsure at all n locations
ccacgccagcgcncgantacnaantanacagnacgtgaaaagtatnnngtatnnttnanttttcnnnaaaatnaaaatgaatnaantaatagaagaaagngaagcatactccantacaaagcncnnnttnnanannanngnannagaagggannccnncagcagagcgcggnacgttttgacantttggganngacnantacgccnnanannccannannnnnnnaancnnnngcnnncncacgggggcganacacgancgaaaacgaangcacacanagccagcgcagacagcgacacntntctatgcattgctatatactacacaaatgacctgacccgccacacgcgcaacacgacagcgagaatgacacgacgcacatcgacagacacagaagcagcagngagccaaagaacctaacggagaacaacacacacacnacacgtatgcacgcaacgcgggaataaagcgaccgcatagctcgggagcggcacccagaccacagggacacgcacaacctaggcaccaaaggacaaaagaatacagatcgcactacacaaaatactcacgagacacgccgacacttctcaacgaagcgacagagacgacgatacactatacatccagcaacagagtacacggagtgcgccgcacacgccagacagcaatccgcggcctccgcgcgaacatcaaccggacacaggcccactccanagacagaagaangacagcacaacacccgccgatactaaaggcacgacatcatcaacgctaagagaaagaaagaactgtgacgcaaccacantactcgacacc

SEQ ID NO: 36444 - DNA, 472 bp, Glycine max
acaccattgagtacacaagcctccacaatatccaagcaatgcaatatccaaacatcatgaaccatcctatttcaagaaaacagggcagaggcagagaactctgcccaaaacacattccaatacaacagctttccctactcaaataccccagtaacattctctttgttccgattcgttaaccgttggatcgactcgaaaattttactggaggtccctagtacataattctacattttgaccgttgggatctgctagaaaatgttcataacccaatatgtactacctttcccataaccagcaatgcacaagcattttttgcacaagaacaaaaattctgctgcacaattcaacagcaattttttgcataataggcagattttcgaaatccctcttgccctcatccaattttgctcaaattggatcctacaagtcctaaatcatatataaaatgtatttaaaccaaaaaaaactt

SEQ ID NO: 36445 - DNA, 439 bp, Glycine max
agttttctcaagaatgcttctcaaggaagctacctatcttttttatagaagcatgtgtaacacggggtgttactttgatgaatgtgagtcttgtgagacacaactcaaagttccacttctctccctttttcttccttcaatttcgtgctcccccctctctctttctctccctctttcttttcctccattgaagcatcctcactcaagcttcttatccaggcgagctcagctcgcccaggcgagccaggttgcttcctccagaagcaacagccttctggaggaatcttctggagggcccaagtgggcctggttgctatttgcacccccatttttactaagtacacccccttgcctttttttggtgattctcttttcataaagttacagaaacttacgaatttcgtaacgatacttgttttctttccgtaatgttacggaa

SEQ ID NO: 36446 - DNA, 201 bp, Glycine max
agctttgtatttccttttagtagggaatctttccttcctaagatggagccaaacctagtccccctcattaagaactagctcatttcttcctctattgcccttagttgaatacacctttgtttggttctctatttgggtcttaaccctctcatgcaacttctttacaaactctgacctagattccccttctttatgtataaa

SEQ ID NO: 36447 - DNA, 438 bp, Glycine max
  unsure at all n locations
aattagggatcatagttatgaacaaggccatattgaatcntaaggatacaaccaagaggaaggcatggactattatgagacctatgcccctgttgctaggttggaagctattatattgttgcttccttttgcttgtataataaatttcaggttatatcaaatggatgtaaaagtgtttttctcaatggatatattgaagaaaagatatacgtggagcaacctctaggttttgtagacttcgatcatcctaatcatgtttacaagttgaaaaaggcactatatggattaaaacaagcacctagatcttagaattctctagttctatccagaaagagttggagatgtctatgatgagagaattgactntcttccttggacttcaagttaagaaaatcaagcatggaacctttntatgccaagcaaagtactacacataat

SEQ ID NO: 36448 - DNA, 355 bp, Glycine max
  unsure at all n locations
ggagccaggggggcccttgcatactngattccaaccatatgtgatagccgcctatgacaccattgccacttcccctaagctcgttatcttttctttccactacattccatgccttacataccctctgaagagtctttgcattatcttcattgaaacctcgtgcgatgaaaggtgcgatggtatcctccgatggcgcacctctcatagggtaacccaactatcttatggctaacacgggattataattaaagtccctatcagaaggatatatgggaacccttcacatgagcataacactcctgcccatccttctttccattgtgggaaccaactaatggacgcgcctatcatgcct

SEQ ID NO: 36449 - DNA, 363 bp, Glycine max
  unsure at all n locations
ctaactaaannccacggagagagatagtgactactcaaaaccaacggatgtgccttgattaagcccatctaatctatctaattaaaccaattacacaaaataaagcccaaactcgtagcccaattattcaagtgcagaggttctgacttccaagctcaatttaaccctcaaaatggcagaattggccaaatcttatttgtagaaaaaatcgaacctcttgttattagttattgagggactactcacacgctccatttggagttctgaagtgtcctataagccctgcacaacgcacataggccaagtagcacaattatcaattaagctcaaagaattttctaagaccaagactatgttaaagtg

SEQ ID NO: 36450 - DNA, 271 bp, Glycine max
gcacaagggccaccgaaggggggtagatcctgagaaccactcatgactgaccctccaaagtgaagatgcccagattgcaactatgggccacaaaattcgaaaagctgaagatgaaggaggaaaagtgtattcatgacttccacatgaacattactgaaattgccaatgcttgcactgccttgggagaaaggatgacagatgaaatgctggtgagaaagagcctcagatcctcgcctaagagaattgacatgaaagtcactgcaatcgagga

SEQ ID NO: 36451 - DNA, 424 bp, Glycine max
  unsure at all n locations
tggaacttngaaaagttgtgtctttatacatgccctttctcttgattggcattngnatnganaggggcatgggagtctctatcttantcatatgtaaatcatgcatcatcatgtagtgctaggaagattgtttctaaagttagaaacatttgcagtgcataaaattctctgttttaattgattttaaggttgctcgcaatcgattacttaagtgtttgtagcattcagtgagattctaatttcgatttaatcgattaccagttattcgtaatcgattatacaatttagttgagaccatgtttggtttttcatgagtctctactttaatcgattactaggtgatcgtaatcgattacttcattcttanatttgctccaaaagtgatcaagatcactctaatcgattaaatcaagaatctaatcga

SEQ ID NO: 36452 - DNA, 426 bp, Glycine max
  unsure at all n locations
tcatttcgtctaacctactatgtctatgangnnncttatngattggcaaagtggtgacctaatcaaggtaggaggaaatcttcaagtctccgtgccattgttttagatctcactgccatttcactgtttgggtttgaggtaagcttggttcgtgcctttgtacatgttcaagttgtttggacttaatctctagtcggctttttgttttcaatgtatttggttcaagagcccagtgcagttttgtacatgtttaatcaatattgataaggattatgaagattagtgttgtttgaagggattacatattgaagttgggatatgtcgtcttgtccagttaaacctacgtgttatgattggtcaccctggccggatagtctggttgggtagttgtgaactagtcaactagttgctgtgttgaattgaatg

SEQ ID NO: 36453 - DNA, 348 bp, Glycine max
agctgtctcctttttctcattttatgcataacatgcaagttcatattttaatttaacgtttactaacaagactaaaatccgtaataagatgaaaaataaattctcaatttaatacttattagtgtatatttaaaagaaagctgccaaaaattagtaattattgattatcattgggacatgtaagaaagacattatgtgtgctttttttactgagacaatgttatttgttttaatagactaataatgtaatttaacatattgaaacatcaaattataaatattctgtacaaaattaatggtatatacgtgttggatgtatctattcagcataaaaaggttcttggatgt

SEQ ID NO: 36454 - DNA, 398 bp, Glycine max
tacctaggagttctacctgagagtcaaaaactctctttatttatcttaaaaaaatgactctgtgtatcaatgttcttatggtcatagttctatgatacctgttgattagttgtttttgtttcaagtgattttgtatattatggttcatggttctggacttcatgattgtttgtaaaaaaatagtaatatcaatctttgatgagagggaacaggatgcatagatttgaattgagtgtttgtttctttcttattcagggaagagaccgagtcaggtgagtgtgagacaagggattcgtacagcgattcctacagtgaagagagtgagagtgacaaactatggaggtgggatggaacttcgtcataagaaggaggatctgagcacgattgtttgtggcaca

SEQ ID NO: 36455 - DNA, 482 bp, Glycine max
  unsure at all n locations
cccccccccccaaactcacttgaatcaaagaaataaagagaaatagaaacnacnaaacccaaaanaagggaaaagtaagttcgagcgtcgcaaaccaaggcgaaacaacacgccgcgggaccccagaacgaccgaagcagcaagctttcacacacacgcaccaagcacnggggagcgcagaaaaccaagacgcaccccaccccgacaaaacccagaaacaaccccccacgacccccagggacaagcacggaagcggcgggcaagaaaacacacacacangagacccacaggacaacgagaccgcgacccaggcaccacaaacaacgcaaaacaacaaaccacccgaccaccagccgcccagccaacgaaccaacaaacaacaacgccacacaacaacaaccgagacacgcagaacaccaacacaagggcaaaagcccagagccaaccccacacgaagaccaaacaaaacacacccaaccccc

SEQ ID NO: 36456 - DNA, 224 bp, Glycine max
tgaatctcagacttggagttatttgacgttccatatatatcgcctgatcgaacctaggtaaaagtatgaccattgaatctttagactccgtgtcattttcgagcgtttatatggagaccttatgacctcggtgaaatatgaccttgatttcagacttcgtgtcaattggacggtgaattttgcgccgatcgaatctggaaagtatacatagaatctcagacttc

SEQ ID NO: 36457 - DNA, 343 bp, Glycine max
ttacttttataagcttgctttgatctaattctgtgaaggactcaatttcaacaatgttggctatagagttggtgggcctcaaaagaattattgatggcattgaggaatgactctatttcctcatgaagctcatcaactactagatcattgaatttaaaagcctcactgatttcttgttgaaactttcctttgtagtatggattcgaaagagtgtcttcaaggttctgatcaaaaacaagtttttcgaaaggagccacaacctcattgaaatgggtaaaaggcatgttgttactcgatttggaggcttttgaaggcatagaatctgaagaccaaacatcactga

SEQ ID NO: 36458 - DNA, 134 bp, Glycine max
  unsure at all n locations
aaaaaccnccggcgcgagggcaccatgaagaaagggcacccccacacccaccggnngcaacccaagggcaaaacgagaaactacggccaagagatcacgaagagaacacgncccagagacaggagaaaaaggcc

SEQ ID NO: 36459 - DNA, 393 bp, Glycine max
  unsure at all n locations
tngcctcctattactagaagttntaaacgtttgagacaacttttagaaatttgaatctaaattttaaagcctgtaattgattacaacttgtgtgtaattgattaccaacatgagaattcaaatttcaagtctgaagagtcacaactcttcagaaattaactgtgtaatcgattacaacagttatgtaatcgattaccaataatgaattttcgaaaataactcccaagagtcacaactgttcaaattttttttgaatggtcatcaatggcctataaatcaattaccagacatgaaaattcaaatttcaagtctgaagagtcacaactctttagaaactaattgtgtaatcgattacaacaattatgtaatcgattaccagtaaggaattttccg

SEQ ID NO: 36460 - DNA, 389 bp, Glycine max
cccttgtgtcggcttgtggggccacactggaatccgcttcaatgtgcccttcctagaccacttcgcggggagcttcttcgtagccaattctaggttgcctcctagtagcacttctttaacgtcttgagccgaacgcgtgatgacttgtcggtcacgggcctagtacttttgcttacctttggctttggacttggtcgcctgctggtcggccatgggtcgtaggcaacgctccagcctttgtagatgagctgaggggctttggaggtggtggcggtgtgtttgttgcccgctgccggccatcccctagctgctgtggtgtctcgccctgcgcctgtctgagggcacagtacttcctgatgaaagctcgattagtatgaggcctgatgacc

SEQ ID NO: 36461 - DNA, 397 bp, Glycine max
  unsure at all n locations
caccccgccagaaaaagagatttaaaanaaagaaaaaagnggaaatacaaaaactattttgcntcaaacccaagagcgggggtgatgcagcaaccaaccancnaaanacagccccggaacccacaaaacgaaagagcaacatgtccccccccaacaaaagggggaacaaacaccacaccccccccacggaacagcaccacccacggaaaccccccaacccccagcggggcacacaacgagcaacccaaaaaacgacacaaccaacccgaccagacacccacaacaacaaaaccaaggaagaacccggccgacgcaaagcaccaggaagcacagaacgcaaacaaaaccagcacggagccaccccccagaaagacgaagaaacccaacaacgccagac

SEQ ID NO: 36462 - DNA, 441 bp, Glycine max
  unsure at all n locations
agggtnnatgattgtgcatgcannncctagataggccgggcccaaaggtgggccaagaggacgggcattaacatattacgtcgacgaaggagtcggggttatataaatacccccagacgcacgcagctgaaaagaaaggaccgcatagacgaacacaaaactccgaggcgacaagagattaaaggaaaagtcagaaggacaggcgagaaaggatcacagagaacactagaaagagggagcactggtcaacacccaactgcgtctccacggatataaggcacaatacggatagacacccgacactcaatatagacactcccaacatatcgagatagaaacggagaagactatgtagaagatacagcccacgtcttagataacagtgcaggaaggacgcacatcgagacttataagagaaactaaagcactggcaaacatacg

SEQ ID NO: 36463 - DNA, 168 bp, Glycine max
  unsure at all n locations
agcnttttatatatcgaggcgctcgaaattgaacaacggtaagtcttgagaaattcaaatggtcataacttttaactcggatgtccaattcatgcgcatcacatatagagacgctaaaaaatgaacaacggaagctctccagaagttaaaatggtcataagttttcac

SEQ ID NO: 36464 - DNA, 418 bp, Glycine max
  unsure at all n locations
ctttgggaccttgaacaggcaactaactcctctntcaaaactatgctatgtgctcgcgactggtccctttggtcctttcgcaacttgagttcactattgctaccccatagagctccgcgaaatttgttccggccatactcttccttgcgagccctcttggtctcttgttcaagggctcttgcggtaattgcattctcttcccgtaacccggcacactccttccgaacgtgtgtagcggccaacttgaacttctccttggcaagttttgcctttcctaactcgctttcgagagcttggacttcttcgtcctctttcggtgcttcaaaactctctttgctgacgacttttaacttggcgagccaatctaaacctcgtatatgaactttcagccattcgtggtacccaccaatgatgccat

SEQ ID NO: 36465 - DNA, 335 bp, Glycine max
  unsure at all n locations
agcttttttaactatnngctcaaaaagccacgggagtaattttttattagtttttaacgctttttaaacgttagttgaagtatcattttttaaaacactaatatttaacttttagtttttatattttctttcatttttatccttaatatacttgtcaaatctcttacttatcttttttaaaataaatcataattttattattttcacgtatttcaataggtaattttattaaatacttataatttaataaactaaatttggaatttcagttattaattttcatgaacataacctaggtcaaactagagctctttaaaaagtcaaactagagatgc

SEQ ID NO: 36466 - DNA, 422 bp, Glycine max
cgagtttcacgccgagtttttacatcgagtttctccggtctgacgacggcgtggcggtgatgagtctggagctcacacctgcatgtaaaagtctggttgctctggctccggcgatgaacctcttcgtccatgcgagcgaatctgttctccatcgtcagtttccactccaaattctcgcgcgcgctgtccaattcttcattcacgatctcgtgtagccgctccttgcacatagtcgcaaccttggaaacgaaaacgatacaacttctctaagtctcatgccctcgacggcggacttggagaccggtggggcgccgtaacggatacgattgtactcggcgaggtgctcctcgagaccctccccgtagaagtaatacccgtgggtgactctcgggaagctgtacgttctctcgagtcccctattc

SEQ ID NO: 36467 - DNA, 126 bp, Glycine max
  unsure at all n locations
agcnttgatgccgatgagcaagtcatcacgcgcgcgctcaaggaactcggcggcggcgccggccaccccgccaagaacgacagcattccccggccaaatggcaccggcactggccggcagcccccc

SEQ ID NO: 36468 - DNA, 251 bp, Glycine max
gcgcatcacccgctcctaccgcacaggcccggattttccatagcggatgcatggtctttgcagggcgttatatctctcataatttcatcgtacactaaaaatacttatgtacaacaatcacttgacctgcctgcatgcgcgcctgtgactgtcccccaggcgactgcaccacctcagtcctctattagacagtatttatcacatgactctgtcgtactgccccggctcttctcttataatcgccgcttgta

SEQ ID NO: 36469 - DNA, 255 bp, Glycine max
  unsure at all n locations
actccttgatcagcagcacccttgtaggcagcngccacaagcgaaaagcatgtttacccgacaaggccggggaaaacccccaaaagcgcgaagaaaaaaacgaacacgcgaagggcggcaaaccggaagccagagagcgaggccaacgccgagacgacaccagaaagaaagacgagaaaaacagccagcgcggaaaacgcgaaaaaggcaacaaaaaccgaagacggacagaaaaaaaacggaaaacaaagagac

SEQ ID NO: 36470 - DNA, 508 bp, Glycine max
  unsure at all n locations
agagcancaccnncccnttttgagccaatagtannancacacncnattagannannngncngggggagctagcatgcctcggattcattggnaccacaaccagattaatctggtccattcgacaccnccaaccacgcagagntatttgtagagatacactagacacctcacgttcnacaggtatacagtattaattacgtcacgctaacgcgacacactacctatctcagctactaacggatctacatgaacacgctacagagcaggctgctcgtacgccaacaaaacacatccctaacggccttaacgcaccagagctaagaatgaataatggtctatggagacaggcactctacagcatatgctacggtgtactacgaggcgatctacacaccgtacatgaatataccaccgatccgtctagggacggaccccctattccttacgantatagacaacccctacactgaatagtagaccaccctactacacaaccactcttttgccc

SEQ ID NO: 36471 - DNA, 322 bp, Glycine max
  unsure at all n locations
agcaccttatctgcacctcttactgatagcagtgngattactttctgagctgctgactgggtagggtgtttttccattatcacctcctcatgcagcagcaaggatgatttcgttcagatttgaatatgccacccaattgcctccctgtgtcttttgaggacctctaccaacttggggacatactctactgaggactccatactgatcactacaagctcggactcgttcttctccaagaacacatacttaatgtgggtgggttaaatcttcaatatcaacttggtcttcacctacatgagtgtttacttcatgatctaagtct

SEQ ID NO: 36472 - DNA, 274 bp, Glycine max
ctggaataaaaagtaataccagactcgtgattctaaagcttcacccctgggcgattttgaaaacagcacttcctggaagtcacgggaatgaacgcccaccacaaccattaactggaaaccaagctcatgatcgcgttaaagacattgtaaccgtgtttgggaagtcccacaagaacacatcatctcccaacaacatgtggaagaaacgctcaatattcattgatcttccatactggtctgatctatatgtgcgacactgtctacatgctatgcc

SEQ ID NO: 36473 - DNA, 511 bp, Glycine max
  unsure at all n locations
agcccgtanacctgatngctagtactttcgcancttgctaanatcggggatcctcagagtcacctgcagcatgcaagcttatttatccacaattntgcatatcatctttttatttgactatanatattaatggttggttgctcagtattaatttcatgtatattttcctttccttatagtaaagagtatttgagtagaaaatggaatcatggatgtggtgtttccttctcttgttccatttgctcttcctttattttccaccctctcattccttatgccacccccatgacacctctgcctttgctccacttcaaaactccttcactatntatgaacatccttattattcttatttttgtgatactggntattcanagacgacaacatgngaaaatgggacagatngttgctcttgngctggagtcacctgccaccccatctcaggtcacgtcactcagctcgacctcagctgcaatggcctttacnggcatatncatnncaacagtacgcn

SEQ ID NO: 36474 - DNA, 239 bp, Glycine max
  unsure at all n locations
tcgatgcaattaagttacacatcattcgggtgtcttattgaagaactntgcacatttgtgagcaagacataatttggtgatgcagcacttaattaccaacttatatgaaaatgatatgcggttatgcaaaatccacatcaacaaagtgaaggccacgtcaatgtccattngaaatgggattttctttttaactatccgtccatgcanaanatgagatttaacttattcgaagtgtaatc

SEQ ID NO: 36475 - DNA, 367 bp, Glycine max
attctctactacatcatcacctgcatgcctgaaaaagaaagcatgaatgtgccatatccaatctcccttgtgtcttacttcctactttaactgttatcatctttgcacctgtatacacaacttctgatcttatttactcccccatgagtgccacagttcttaattaccttgcgaagcatataattaggtataataaattagaagtaataatattttattagaagaacatatatatactacccatgaaacatgcttagtattttagcttattgaaattatgaattgggtttagatatggattcatcttgtattggaccattgaattactcttctctgccctttatcccatcatcttgcttcttcttat

SEQ ID NO: 36476 - DNA, 437 bp, Glycine max
  unsure at all n locations
agctttggctcttgttttcacagtattttntcaattgaaatttcagaactaagatgtgtataacatangcaccaattatagaataaattttgagccanaacaacaagcacacttccctttcacttttttttttcctggatactgatttttctgccaacttgtgtgatttttagtattttttccatttatctaaatcacttggttctttttgtataactgttttccagatgtctaanaaattcagtaaacatttcagctaanaattcaaagtaaccaattctcagtaatttttacaagtttgtatgtccaagctgccagcaccagcgatttttttttaaacatggtatattgattgccttgggcttactttcaaccttcctatgtatgttgaactcactagtattgtttaccacagttntaggagttcaatattcact

SEQ ID NO: 36477 - DNA, 418 bp, Glycine max
  unsure at all n locations
tatgtcgaccnctttgcagaccttgtctntacttgagatataatcgagtccggactgaggaaaggcaagtttgaatacgcctccaacgctggccccaacagcaatagaagagccccagtggtgggcacatggaanaaggaaggagatacccacgcggtcaccactgccccaacgtggatgaaaacgccccanaatgctcanaactcataccaacacaaccacccgaacttctcgatccgagccgggagttccctcccaactcaagtagaagggcctgccctgacgaaaaaagcgtntgcacaacacgcggctccagccacaccccgactagccaataatacgactcctaacacaagctatgacaatccgcgacgccccctgagagaccagttctcttctattcccatggcgtattctg

SEQ ID NO: 36478 - DNA, 416 bp, Glycine max
  unsure at all n locations
agcttggactttctgtgttctgggaacctctccttcctcaggtgtacccaaacccaatcacctggttcaagcacgactttctttttgcttttgttggcttgccttgcatagctcacatttttcttttcaatttgagccttcacttgctcatgcaacttcttcacatactcagctntagcctgtgcatcattatgcttaaacatagcaatgttaggcataggcaacaaatcaagaggagtcaaaggattaaatccatatactatctcaaatggtgaacaattagttgtgctatggacagctcgattataagcaaactcaacatgaggcatacaggctgtccaagatttaagattnttctntaatacagtcctaagcagtgttcctaaagtcctattgactacactcagttgaccatc

SEQ ID NO: 36479 - DNA, 376 bp, Glycine max
  unsure at all n locations
ctgtncaattgcttcagattgttgcacagaagggcatttttctgtgtggtggtcggcagaggagcataaaccacagagtctagcgacaagtgcatattttttattcatggccagttgggttactaggttaaccaaggcatctagtttaccttcaagcttcttagtctcagctgatgaagatgaattcgtggctacttcatgcactcctctaatgacaatagcatcatttctggcactaaattgctgggagtttgaagccatcttctcaattaaatttctggcttcagcaagggtcatgtctccaagggctccaccactggcagcaccaatcatacttctctccatgttactgagtccttcataaaaatattggaga

SEQ ID NO: 36480 - DNA, 371 bp, Glycine max
  unsure at all n locations
agcttgtcattggacaatatggactctatagcatcctgaatgtgactctctgcgtccaacagattctccttgcaatcagccaaaccctgttgaaccttaggttccaaattctggtcgtcgatcattctcttacaatcatttagaatgctgctcgcatttgacgccgcagccttcagagatatcattgccagctcctctaggtccgcgtgatcactgtctgggtccgaggaaagcacctgcatgcacaattcattgtttcccctgtttttgcatatgctcttaattagctccttgcctaatttttcttccgccgcaccgcttcngtgatgtgctagaaccaaccacatgcatatgcccatcacccacaacaa

SEQ ID NO: 36481 - DNA, 385 bp, Glycine max
  unsure at all n locations
cttgcctttctgcatgttcatgatcatgttaccctttagtatcattatgtcaggtaaacaaactttatttcacaaggattatttgtgaactgtttgccttgacgatatatctggtttaatctttctcagcagaagagatggtggtttaatcttttccatcacttacccatcacagtatcacttttttttttcttttctctctatctctctgttatttccatctcaatctacctcaacttgataaatatatcacttctcatgttacgacgttatgggtgtaatcatgaaaaattgaaaagttgagtagataaaggagtggcactgcttttcctttactcggaagtcatgtaatgtactagctagganaatgaaggaatgagaaaag

SEQ ID NO: 36482 - DNA, 384 bp, Glycine max
  unsure at all n locations
atcttgagattangaagtgtagaagggtgaaacttcctgcttttattcgttggccacagagtggtacctggagatatgtcgcgggggtcaggagaccttggggacgtcatgtggggtgctattgcccaaaaccaagcttgaccaatcccgacccaacccgggcatagtcggtcagtgagaacctgtgatgtacctaaacaggcgagctcctggcagtcaacagataaaaggaacaaagaccacaaagcaaggaggcttgtgtggtggctggccaactgtgaatcttgtgtgatataaaggttatggcctttggtaatcgattaccaatggtgggtaatcgattacaaggcttataaatgaagataggacgctaaaatggtctct

SEQ ID NO: 36483 - DNA, 405 bp, Glycine max
  unsure at all n locations
aggttatttaaatactctaacattagagtatgctagcaatctcatatatatatatatatatatatatatatatatatatatatatatatatatatatatatatatatatatatatatatatatatataattntaataagagatatatttataataaaaatattgtaaataaaattntctaattattttttattttaaaaaattatgtgcccatcataaaaataaatcgaacatcgcccgctcatacatttccatctctcactgtatattattattattattattatgatcattatgattatataacacaaaagtctcctttagttatagaatatatctttaatctgcgtgtatatctagagaatacaaacatatactgnaagtgtattctataactatggctctg

SEQ ID NO: 36484 - DNA, 448 bp, Glycine max
  unsure at all n locations
ctgatggtgtanagaagaaaccacttgtttgtcattatcaaatatatggagaatgtgaatgtatgtgtacatgattttgataatgtcaaagaagaatctaacaaggctgcttcaaatgataagcatttgcttcaaaaataattcaagattacttcaacaaacaaagcattgtttcaagattcactaaagaccaagccttgccttaaaacaaagtgctttcaagacatgcaaggctttggtaatcgattaccaggaagtgtaatcgattaccagaagacaaggttgagaaatagctgttgaaaagagttttgaatttgaattttcaacatgtaatcgattaccagcaacgaaactcttgaaattcanattcaaaagtcatgacccttcanattataactgtgtaatcgattacacaaacattgtaatcgattaccagtgaagagttttc

SEQ ID NO: 36485 - DNA, 419 bp, Glycine max
  unsure at all n locations
atcttgaatcttataactattagaaatggaaataaggcaaatatgaaatacctggttaaggaacaagggcacctccccacgtttaagtaattgtgaaatttaacgaggtttctatcacacaatacaaattaaacttctccaccaaagaaacctccccaagaaacgcccatcctagtatattgccttgagctataacacattcttgttgccttgtctctcctttttcctttttttttttattggtgatagatagatagatgtaataaaagcaaaggccgtgtttgaagaaaataaaataatgaataacaaattagagctttttaattgtctgtgcgaagcctactgaaacttacatgtgcaaaacattgtctcgataaagataaaaataaaaaaattagaagatgtcatctnattatttt

SEQ ID NO: 36486 - DNA, 439 bp, Glycine max
  unsure at all n locations
ctgaatggacgttagttntagtaatagtcattctagcttaagtatcttaacaacattntcttttaggctatgtaagaaagaaacagacaaagccagtacgacgatgataaaggagcattatttgagacatgagtgctcgtaatgaatcacatcaagtatatgtgacatgagcacatgatgtgtgcctttaactgaaaaacattaacaattcggaacactaagcaatccaagtattttcctctgaagattcttccattgtttaaattaaaagatagaagtgatccatccactgcagttggcaaataatctagaaattntgcaatttaagtacgtataacatgtaacggtgagagttcacgtaatagaactgcaaaactcacaaagaannaaagaattcaaaaacaacgaaatggttagcacttggcagagtgtataacat

SEQ ID NO: 36487 - DNA, 392 bp, Glycine max
  unsure at all n locations
atttntatatgattggctaagatnncgttaaaacataagcacttagacaatgaaggaaagctggagttgctgcacatgatgtccaacgttatgtcaaagaataagatcgggctgcacaatgcacaaggcaagataaagtgtcaaatgaagaattgaagctgcaggattcacgatgtcggatacaatgtccaggacatcctgcccgaaaatactggagttgctgaaagcattgaagttgcaagatccacgatgtctgacacgatgtcctgacatccggcccgaatatactggacatataaatctgttatatctntaacagattattgtgcagttagcaagagataagatgatctatctttaggaacgaattaagagataattatagttcgaat

SEQ ID NO: 36488 - DNA, 385 bp, Glycine max
  unsure at all n locations
gtgtggaagagtcagtcttcctatttttatttgtttaccacagagaggtacctggagatatgtcgcgggagttacgagaccttgnggacgtcacgtggggtgctattgcccanaaccaagcttgacaaatcccgacccaacccgggcatagtcagtcagagagaacctgtgatgtacctaaacaggcgagctcctggtagtcaaccgataaaagaacagagaccacaaagcaaggaggcttgtgtggtggctgcccagctatggattctgagtgatatctggaatatggcctctggtaatcgattaccaagggtgtgtaatcgattactaagcttaaaaatgatgacatgatgttaagatggtctctggtaatcatttccaagag

SEQ ID NO: 36489 - DNA, 422 bp, Glycine max
  unsure at all n locations
tgtctntaagtatcaagattcaagaatcaagagaagactctatcaagataagtactaaaaaagtttttcaaaatattgagtagcacaagaatttttcacaaaatcttttaccaaagagttttactctctggtaatcgattactagaaggtagtaatcgattaccagtagccagcattgttttcaaaactgatttacaaagttgtaatcgattaccataatcatgtaatcgattaccaatgttttaaaatgttagatttcaaatttcaagagtcataactaatgataaaacattttcaaatcattttaaacttgtgtaatcgattacacaatacttgtaatcgattacccgtgtntctaaacattnntgatttcgatntaaacatgaagagcacatctttgatgtgaatcgataccatgactg

SEQ ID NO: 36490 - DNA, 410 bp, Glycine max
  unsure at all n locations
ctgaggganaacttgatgccttggtcaacctagtatttatcttgccttgaatcagaaatatgcacctgttgcaagagtctgtggtctatgttcttctgcagatcaccatacagatctttgtccttctttgcagcaatttggagtcaatgagcaacctgaagcttatgttgcaaacatttataatagacttcctcagcagcaaaaccaacaaccgcaaaataattatgacctttcaagcaacagatacaatctaggttggaggaatcacccaaatcttagatggacaagtcctccacaacaacatcagcctgtccctcatttncagaatgttgttggtccaagcaagccatatgttcctcctccaatgcaacagcaacaacagcagtcacaacaaagacaacaagcaaccg

SEQ ID NO: 36491 - DNA, 378 bp, Glycine max
  unsure at all n locations
agcttatacttatattgatgatcatagnntgagaatcatacactccatgtcccttatatgtgcaattgacttaagcataccagacatcatacacaagtatggccaacccatgccactctcacaactcattgcttcactaccaatccacccatccaagacttgctacatccatcgcttgatgcgactctttactcattccggtttcttctctcggcacgatttggtcgaaaacgaacaagaagtgatcacgtatgagctaactgatgcatctagactactcctcaaggaccacccttttagtttgaggcctttgttgctagtcacacttgatccaagtgtgattaagtcatggtgtcaattctctacttggctcacaag

SEQ ID NO: 36492 - DNA, 387 bp, Glycine max
gtcatggtggttgtgatataatcaatgtttctatcttgtcactgcaaaatttggaaagcaaaaaagaggatccactacctatgatgttaagtaacataagggaacttttctcttgctatcattctctatctgtttttctctctagcatacctaaccattttattaagtcaaatcatatttaagttattaatcttggatgtagatgacaattattcacttaagttccttgcagttaattattagcattggttttaaaggttagttagtatgtttggactatatataggatactgatagtaattaaataaaatttgttttggcaccttatgtgctaattagtacatttcgatagatttcaaccatggattaccttcttacctttcgtaa

SEQ ID NO: 36493 - DNA, 411 bp, Glycine max
  unsure at all n locations
ttcttatgtacttgagagttntatcatttcgtgacttccgaagtttggattctttgcctgattcaataggtaaattgatccatctgcgctatttagatctctctcattcaagtgtagaaacactgccaaagtcattgtgtaatttatacaatctgcaaactttgaagttgtgtggttgcatcaaactgactaagttgcctagtgacatgtgcaatcttgttaacttgcgtcatcttggtattgctgatgctcctataaaagagatgccgagaggaatgagtaaattaaatcatttacaacgtctggatctctttgttgtgggcaagcacgaacagaatgggatcaaagaattgggaggactctccaatcttcgtggtcaacttgaaattatgaacttggagattgtctccc

SEQ ID NO: 36494 - DNA, 435 bp, Glycine max
  unsure at all n locations
tgtatgtgttacaatgttcttaaatttctatttagtttttaagaacaacctgtctaggtaatttttttcagaaagacttttaacaaaataagaaaagaaaagtttttcataattaccttatacacaacctaatgatagaagctctttcatattagtttttttcaaaagatatttttaaattatgtataaactaacattaacttatagataagtntatttaattttttttctttctattttccttttttactagtacttctaaatacatttatccaaatagacccttaatattaatatatatcaacaatacttacatccaaatgatcacttaatcaagacttgaaattattttatataaaataaccagattaattaaccaattacgtgcttgggtttcatttctaacatcaatattagtaattatttagaacattt

SEQ ID NO: 36495 - DNA, 426 bp, Glycine max
  unsure at all n locations
catgggcaactatggaatgaccaaatcctcttgggataaaaggtagtggtggccattggtttcaaaaccccgtacttaaggcattacacttctttatcattaagtggaaatagttaagggtanggaccactttaactttttcacttaaaataagccatttggatgggccttcttgcatcaacacagcccctaanccaacattttgaagcatcacacttcaatttcaaaagatttttgaaaagtttggcaacgcaagtatggnggcattagttagctnttgcttaacattgaaagcttcttgttgtttctgtccccatttganaccaacattnttcttgagcacttcattgagaggtgctgccaatgtgctaaaatcattcacaaatcgtctataanaacttgctaagccatganaactcctcactn

SEQ ID NO: 36496 - DNA, 359 bp, Glycine max
  unsure at all n locations
agctttcttgtggggcttttatggaggctggatctttgaccctcaatgaggtcctttattgtgattctcaccatggagatgcagcggacgacaaaggagaagaagatgtaagatgcgacgccatccactatggaataagccatggaagaaagagcttcaccaccaagatgagcctnggataagaagcttggagaggatgcttcaatggaggaaaagaaagagggagagatagagagatgggggagcacacaaattgaaggaagaaataaatgagagaagttgaactttgagttgtgtctcacaagactctcattcatcaaagttacaacaagtgttacacatgcttctatttatagact

SEQ ID NO: 36497 - DNA, 174 bp, Glycine max
cgtctcactttcatgcagaacacaaatgccttcacaacccatgttgttctgtgaggtgtttgatgtccgggtatagactttatgggcccttcctgtctcttttggttttgcttatattctccatgatgttgattatgtctcaaaatgggtggaagccaaagccaccagaactaa

SEQ ID NO: 36498 - DNA, 315 bp, Glycine max
  unsure at all n locations
tcgtatccagtcaaggtctgagagaccattacaagtttctaacgatttctaattatgtgggccattaagtctatcatatgctgacaatagccgagaagcccatgaatctcttcnggggcggagtangtgtctgccatcgccttggccttggctaacaatcggagaagttcttgactcccgtncaaggtaagagcanaccgatccatccacatggttgcctcttggtgtaaagagtcgatcacccttcctctagcctctntttccgcgtatacttgggcatattcgtccgcaatcctatgctcgtgggccgcggct

SEQ ID NO: 36499 - DNA, 341 bp, Glycine max
  unsure at all n locations
acaaaagtgttacaacagaacctatcggtttctaattatatgggccattaaatctatcatgtgttgacagtaattgggtagcccgtgaatttcctctcgggctgaacacactncggccatggcccttgctttggctagtagtcgcgggaggtcttgactttcatttaaggtcaaggcgaacctatccatccacatggtcgcttcttgatgcaatgcatcaatcacccttcctctngcttccttctcngcgtatgcttgtgcgaagtcctctactagcctttgctcatgggtcanagactggtttaaatcttctttgtactaccctattatagctagcatgc

SEQ ID NO: 36500 - DNA, 378 bp, Glycine max
  unsure at all n locations
agctngagctgggaattttgatncatggatnnctcaagaagaagatagatagtgacatgtttgtatggtctgcattgattgaatagtattcaaagtgtggacaaatgaatgatgctgtgatagtgttaacagagtatccaaaaccagacgtggtcttatggacttcaataattactgggtatgagcagaatggaaatgctgaacttgcacatgcncatttctcccgaatggatgtgtttgagctagtaagtactgatccacgaacacttgttaatgctgcttctgcttgtgacgcagtatctgattctaaccttggaagaagtgaacatggaattgtcaaacgaaagggttttatactaagtatgtttggcaattcta

SEQ ID NO: 36501 - DNA, 441 bp, Glycine max
  unsure at all n locations
gcctcattaaactatatatttcccgaagggtttttttttataagcctcctatttttaatggcgtgggttaccattattggaaaccccgcatgcaaatttttatagaagcaatagatctaaatatctgggaagccatagaaattcggccctacattcccactatggtggaagcaaatacaaccatagaaaaaactatgaaagaatggagtgaagatgacaagaaattagttcaatacaatntaaaagccaaaaatataattacatctgctttagggatggatgagtacattagggtatcaaattgtaaaagtgaaaaagatatgtgggataccctacacgtaacacatgaaggtacaacaaatgtaaaaagatctgggataaatacattgactcatgaatatgnaatatttagaatgaatcccaatgaaagcatatatgata

SEQ ID NO: 36502 - DNA, 281 bp, Glycine max
gagaggagaatgactgactcaaaccacttacagactagacgacagtcagcggtgtactcgtgtccgcccagtatacagaacctatcaactctagtgcctatgtacaaattatcatacacttcaaattcactctagaaacaaaaataacatgaaaaattgacatacaaaaggccaggttatgactgaactccaactgaaatccagccatctgatggcatgacacactagaaagcatataaaccatctcacgtttacgccttacgatatcatttcttgaaaac

SEQ ID NO: 36503 - DNA, 295 bp, Glycine max
  unsure at all n locations
gcagcggagcaacaaggattatacttctgaccacttggtgacaaaggctctcaagccaagttaagaaccaactcttctttaaattcaagctattangtgtagttgaatggttctatatctttaacacatgttgtactttatttgcagttgaatggcttccatgtaagcttgtacccttgaatattaagagagattatctaatacgcatgattttcttaatattatccaattattcaataatgactttaattctcatatgcttgattttcttcttaattattctaattatttatgt

SEQ ID NO: 36504 - DNA, 352 bp, Glycine max
  unsure at all n locations
gtcgactgcggcatgcaagtcttgggttggctattgagacgtanacagacaatggcgagggtgctactaccacaattccaagctcacgggagagtgaaggagccaggtatgaccaaacttctcctgtagtttaacaaaccaagcaggaagatgatatgtcaaggtgatcgaacgtgcaagagaagtgcataatcgcgaattagatatgaaaatttcaaggacggtgctgggtataaatcgcaagtaatcttctaacatacaaagccgatttgtataaaaccggctttgtaacattcacatcgnaggcgggtttataaaaatcttcgtggatgccttcataaagttgaataaa

SEQ ID NO: 36505 - DNA, 226 bp, Glycine max
  unsure at all n locations
acacaacatcggngatgttggaagaaccgatgngacgggtataaacttaacatcggttttgatgacaccgatgttcacaaattaatgttagcatccggttttaaacaaaccgatgatcacatcaactagttcacattagtgctttcaatatcgatgtcaattaaccgaatctattaccaccatgctcttgataacatcagtttttagaacaaccgatgctaacata

SEQ ID NO: 36506 - DNA, 414 bp, Glycine max
  unsure at all n locations
agcttgtgcatccaatactcctgatgaggatgtcccatatgctcttaaaactggactgatccatttgcttcgaaagtntcatggccttgcaggtgaagacccgcaaaaacatctaaaagaattccatattgtctgatccaccatgaaacccctagatgtccaggaggatcacatatttctgaaggattttcctcattctttagagggagtggcaaaggactggctatattaccttgctccaaggtccatcacgagctgggatgacctcaagagagtattcttagaataaattttccctgcttctatgaccacaaccatcagaaaagatatttcaagaattaggcaactcagtggagagagcttatatgaatactgggagagattcaagaaactatgtgccagttgccctcacca

SEQ ID NO: 36507 - DNA, 458 bp, Glycine max
  unsure at all n locations
tctccttccttntcctataaataggtgaaggagggattatacttattgttcaaccctccaagtatttgagattcacttaaaaatagtgagaaaaattatttctgtgaagaaaatccaagccgaggcgcttccgtaacgtttccgtaatgtttccgtgggtgatttcgcaaagattttcaaccgttcttcgtcgttcgtcattcgttcttcgtcgttcttcggtcttcaaatcggtaagttcccaaaatcgaacttttcaattcattctatgtacccttagtggtcctcatttgtttcgcgtgcttttattttcatttcatttactttccgtaccccccttttgacgtgctttagtcatttacttaagtcattttctcgcctaatcaaanataaaataaatttccatcgatcatttgaattgaacatctgtaatttctgtaaaatgaaatcgaccgtcg

SEQ ID NO: 36508 - DNA, 419 bp, Glycine max
  unsure at all n locations
acccgggatccttaagtcgcctgcagcatgcaattttggtttatanagacaccgtctcgtagtcatatgagagattttggttgtacaacatatgcattagtagatataaggactaagctggatgataaatttgtcaaatgtgtatttattggctatgctacttagtcaaaggcatacagactgtataacccactaactggcaagataattgtcaatagaaatgttgtatttgatgaagatgcaagctgggttcgggaggaatgtgaaatcagtaacagtgtttagcagaaatcagtcagttttgatggttcataagaggtctcaaatgtgccagactatgatcacactccaagccctcattcaacgccatcaagccagtgatcattagctccttcaagccatggatcatctagctcatc

SEQ ID NO: 36509 - DNA, 269 bp, Glycine max
  unsure at all n locations
ttaattcaagaataagttattttggttcatcttacttattttaaaatgttgtaacaatgtttctcactctttttggacataagcaaaatcttacccatcttgcttcttagcttacatatttgaantctgctcaaaagaaataatattatatcattgtacatttgtagctggtttttcttaaatatactctcgttacattgtcgtttattaacaaaaaattaacaacgtatcatatgagtcttaacatatacaataatcgataatataaa

SEQ ID NO: 36510 - DNA, 195 bp, Glycine max
atcttttattctaaacacagcagcacgggggacctgactttttacgggtcaactgtgtgcctgtaataagacacattggattatgatgcaaacatgttgtatgtgatgtgaacctaatgatattagtagtgctggatctatgagcatgacttgagtgagcatcagtgcgtaaccgatgatgcagtatgaggagac

SEQ ID NO: 36511 - DNA, 367 bp, Glycine max
attttgtatattggctagacatgatacatgtcagggcttggtttggttcaaggataaaagggatgccccacattatttccatgacacaaatgcaaaaatgacgatttggaaattttatgcaaaactggttatgcatgcacctatgcggacactcaagtgtcaaatttttatggtcatgtgatgctacggctcacgattcatttcctctattttagtcaacccaacgtttccaaaatatgttcttttatcaatttgtgcattcatccgagtccattgtgggcatctgggaaaatcttcacagcattcacccttcatgtgtatacacattgtttcaaaaactagttatgatcagtgaattcttccaaag

SEQ ID NO: 36512 - DNA, 450 bp, Glycine max
  unsure at all n locations
agctgaacatcaagatctaaatcttagncactattanattctatgttgcttcatcaaggtaaggagagtctctccaattcttaaaccctaatcttggtgtctttggaagctaaccttcattgaatgttgttttgatgttcaaaatttcatagctactgcataggctggaactgtatcatgtgttgtttctcttgtaattttaaggtaaaaaatgagttatttgggtgccaaaacttaaggttaaccttatatttcacctaaatcatagttttctagtaaaagttatgaacaaaacaagtttaaagaatcacgataataaatcggagttttctagtaaaagctatgaacaaatcaggagtctttatggatgtatggaccatttttcataaatatttgacttcacaaacgagtttttaagtgtgaaaatatatgggaacatgtcaaattcat

SEQ ID NO: 36513 - DNA, 415 bp, Glycine max
  unsure at all n locations
agcttggatttggttcacgctggcgtcgtacaactggtcangaaaattattntccattcttagtggctnttacacatgaggtatgactcaactgcatgtacttacactagctatgtctgctaaattcgactccaaattccaacaaactccatgcagaatacgcaactctnttattgaatgataatattaggattattaataatttaaacataatattgctctcttttttatcaatagttttaaaactattacaaacgaatgaacacaaatatttgaattaataaattaatatttactactatattttanattaatgtattgngcaatgatatttgaatgatgttanggcatgtntgataggagatcaaaattntaattttaacaaattataggttgaacaattaatttctcatgt

SEQ ID NO: 36514 - DNA, 432 bp, Glycine max
  unsure at all n locations
tcatggtgaatcanaggtggtttgatgatatcaatgtatgatatcaaaagatgatgacaaaggtgatgacaaaaagctcaaagatcaatcaaagaacaactcaagtgaatcaaagatcaatcaagaacaattcaagagttcaagataagaatcaagaagaattcaagactcaagaagaaagtttagagtcaagaatcaagattcaaggttcaagatctcaagaatcaagatcaagattcaagactcaagattcaagaatcaagagaaggcttaatcaagataagtatgaaaaggttnttctcanaaattgaatagcacatggtttttctcaaaacatgtttaccaaagagnttttactctcttgtaatcaattaccatattgttgtaatcgattaccagtagcaaaatggatnntgaaaagttttaaaattg

SEQ ID NO: 36515 - DNA, 370 bp, Glycine max
atcttgtcttaagggggtacggaaggtaaatgaaatgaaaataaaagtacgcaaaacaaatggggaccaccaagggtacatagaatgaattgaaaagtttgatttcgggaacttaccggttgaagaccgaagaacaacgaagaacgaacgaaggatggcggaaaatcttcacgaaatcacccacggaaacgtctcgaacgagttacggaagcgcctcggcttggattttcttcacggaaacgatttttctcactaatttcaagtgatcctcagataccaagagggttgaatgcttttgttcttccctcctccccctatttatatggaaaagagggaaaagcttgccacccagctcgcccaggcgagctgg

SEQ ID NO: 36516 - DNA, 404 bp, Glycine max
  unsure at all n locations
tgccgcccagctcgcccaggtgagcaaggttgcttcctccatatacaacagccttctggagggcccaagtgggcctggttgctatttgcacccccacttttactaaatacaccccctgcctttttttttgtgattctttttccgtaatgttacgaaactttacgaatttcgtaacgatacttatttttcttccgcaaggttatgaatccttacggattatgtatttactcttttttagctttcgaagaagttacggaaacttacggattgcggaanaacacctcttttcgacttccgccacattatggaatttcacggatcgcgcaagcttgcttcctttagatntctgagacgtctcangacttcatttattgtgcaacaaaggacgccaagtatctcaaagc

SEQ ID NO: 36517 - DNA, 509 bp, Glycine max
  unsure at all n locations
nnaaagtcgggttacctagcccacgtagacncgcanatcagctagnacccgcgaccnnagagtcacctgcagcatgcaagctttcgtttacagacagcaataagttattcggtaccactcgggttttccgccctcagcgtgactcaaaatcaatatgacagatcctgtgagcgtggaagatgacgttaatctccgcgtgtcaacgggccttgtcggcgcgatggacgaaaggcgcagaagacgacattagtctatgcgtgctatcanggctttcatcttacagacagcaaaaagtttatacggataaccactcgggtatttccgcccgtcagcgtgactcaaaagtcagtatgacagatcttgtgagcgcggaagatgacgtaaatctccgcatgtgaacgggctagtcggacgcgattgacgaaggtcgcanaagacgacgttagtctctgcgtgctatcaggcatttcggtctacagacagcaacaagtttatacggataccactcg

SEQ ID NO: 36518 - DNA, 375 bp, Glycine max
  unsure at all n locations
ataacacgcagagactaacgtcaacttctgcgaccttcgttattcgcggccgacaagcccgttgacacgtggagatttacgtcatcttccgcgctcacaagatctgtcatactgacttttgagtcacgctgacgagcggaaatacccgagtggttatccgtataaactttntgcattctgtaagatgaaaagcctgattgcaagcagagactaacgtcgtcttctgcgcccttcgtcaatcgcgatcgacaagcccgttggcacgcggagatttacgtcatcttccgcgctcacaagatctgtcatactgactnttgagtcacgctgacgggcggaaatagctgagtggttattcatataaactttttgatgtct

SEQ ID NO: 36519 - DNA, 369 bp, Glycine max
  unsure at all n locations
agcttgagattggtggtttatagcttaaagaaactntaacatgtagtgtttattatggagtatgaaaagagaggacttgaatacaggtaagtataaaagatagaccagttttgtggtgaaagaataaatgaaatatctggctcanacttgattcaatgacctgaatagctcaaggaaatataagcacctatgatggttatggcacgtacttcaacaattaattcattttagaaactataataattgatacgaaataaaatgtgtggaaatattgagaccatactgcaaatgagcaagtaatattcatcttgaggttccaagtatatattgatggctacacagattaatcccttgaagttaatatactaa

SEQ ID NO: 36520 - DNA, 423 bp, Glycine max
  unsure at all n locations
cacacagattcagaatgagaagtgccaacttgactataactttgtgcagaatcccaattagatgaacctgggctttccttcaaggaagcaaactgcccattcttccgatgcatcctagcaagaataaaagacagcaaaaacagaacagaaaaaaaattataaatatagaagaacaaatcaaacttcaaaaacaacctgcaatcaaacaaaacctacaagaatccctcaaaatggcactcaagtaccaactatcaacacaacacattatgttcctcagtccttagctgttgagaaatatgctcactgatttgactntacctgataacaactcaggcctaatatttcatgataaaaaatttcaatgtaaaaacaaatttagtcagaccagacnactgacctcttttcattataaatctacatatg

SEQ ID NO: 36521 - DNA, 418 bp, Glycine max
  unsure at all n locations
agcttcgcattagtcgtgtgttgtccatacattaaccaggtgtgtttcaatatcttcctagacacagaattcaccaacaacatactctagtgcctcgnttgcattatgtatcaatttaccattgtggtgcaaaataagagtgatttcatcacaaatcctataggtgaacacaaacatcattatttgtattttcacaaaccttgtttatacacaacatcagtaatgaaaaagtataaatacaattttgagaacccaaatataaacctccaaatgaaacatcattcaaaaaaaaggaacaagaagccaaatgaaaaaagagcatacaatgcacaaaaggaaatgacttcatcttctagggccaagaaaaaatgagatgcaatgtggatgacgatatatagatatgcgaagaaaatgagtg

SEQ ID NO: 36522 - DNA, 474 bp, Glycine max
  unsure at all n locations
actcaagcttatcacacaaaggtgttgctttgtgtggaggaaccattntctttggttttctctctgactttnacaataagtatgtggtcaagaaacaccacttgagtcatgacacccgttccagtggagacaataattgaggttccaagggtgttagacatcatggttgcatggtaggcaaacatctcactcatgtggttcttcaacacttgaccaatgttaggtggcattttaccacttggtatagtggcttttgtttgcaatgctactatgtgccttacttgcacaacttttagtgggaacttttcataagctgtttctctagacaacattattccgttagaaccttcttgaacaacaattactaaatatgatacctctattctggttagagtcgggtgaacaatcatgttgtctagcatatgtgatgccacaataacagtcttttccatgcttagacacaagtttattatc

SEQ ID NO: 36523 - DNA, 391 bp, Glycine max
acgccggtgatggcatggcttcaaacaaactatacccacatcaaagagatagcgctaaaaaaacaccttgcttgagatctgcatacaaaaaattgtgatatcaaataacgccacacctgagcctctcaatattaactaaagaataaatagctagtcaaatatttattaaagatacataaaccaagagtagctactggcgagctacacaccgacatcaagctctcggctgcttgcataaactccgggcatggcatcaatcacgcccgcaagaggaatatctcgtcgcaagacccggtgcctagccggtctgaccattgctaagccaccccctgaatccaaccctcgcggaacgctcttccgcgtgatacatgcaccaaccgtacgtcttccg

SEQ ID NO: 36524 - DNA, 455 bp, Glycine max
  unsure at all n locations
tgctcattgctccaattgcagcatggaagggcaattgtctgtgtgatggtcggcagaagagcataaaccacaaactcttgtgataagtacagatttctaattcaaggctagctgggttaccaggttaactaaggcatctagtttaccttcaagcttcttggtttcagctgctgaagatgaatccgtggctacttcatgcactcctctaatgactatagcatcatttctgccactaaactgttgggagttggaagccatcttctcaattaaatntctggctatagcaggggtcatgtctccaaaggctctaccactggtagcattctatcatacttctgtccatgttactgagtccttcataaaaatattggagaagaagcaactctgaaatctgatggtgagggcaactggcacatagttntttacatctctcccantattcatacaagctctct

SEQ ID NO: 36525 - DNA, 519 bp, Glycine max
  unsure at all n locations
aggaggaggggnnggcctcccgcttaccgnnccnccccacccccggannccgcaccgacgancnnntanacnganntgangnatgnaagnttgaatttatgattgtataatggtgaaanttnntggttttattngttgagganagagtggtanttggagatatgtngngagggtnaggagaaaattgggangttaggtggggtggtattgnnnaaaagnaagnttgannaattttgaaaaaannngggnatagtaagtnagtgagaagntgtgatgtatntaataaggggagttttntggngtnaatagataatagaataaagaaaanaaagnatggagggttgtgtggtggnttggnagatgtgaaatntgagntgtatatgggatatggantntggttatagattaanatggatgggttattgattattaagattaatagtgagaattggaaatttaaatgatntttaataagatgaattgttaatatagtaatataaangttaagaatttgtattg

SEQ ID NO: 36526 - DNA, 275 bp, Glycine max
  unsure at all n locations
tgggtttatgcgcgatttgtggatgtggaaaacttgttgtgcaccatcgcccgaccgccacctagtaccacatgtgatgggtaccccataatcctacaagcttgagatgaggaagtgtagaagggtgaaacttcctgctnttattcgttgaccacagagtggtacctggagatatgtcgcggcggtcaagagaccttggggatgtcaggtggggtgctattgcccanaaccaagcttgaccaatcccgacccaacccgggcatagtcagtcagtg

SEQ ID NO: 36527 - DNA, 406 bp, Glycine max
tgtttgagatgaagaagtgttgaacggtgaaacgtcctgcttttattgttgaccacagagtggtacctggagatatgtcacgggggtcaggagaccttggggacgtcatgtggggtgctattgcccaaaaccaagcttgaccaatcccgacccaacccgggcatagttggtcagtgagaacctgtgatgtacctaagcaggcgagctcctggcagtcaacagataaaaggaacaaagaccacaaagcaaggaggcttgtggtggctggccaactgtgaattttgtgtgatatgtgattatggcctctggtaatcgattaccaacggtgggtaatcgattaccatgcttataaatgaagacaggaggctaagatggtctctggtaatcgattaccacggagtgtaat

SEQ ID NO: 36528 - DNA, 460 bp, Glycine max
  unsure at all n locations
tagtcaagctaagcactaacaatctcccnctttggttaatttgtctaaatcatacttagacacttcctgagcaggtacgagcagttatgcaagtgggatcagcaacttccattatcagagtaatcaagcacagcggaatctgtagtttagacaagttgcaaatcgtttccaggatgtcaagacatctcacatgacatctgctttctgcttctgctccccctgtctccatgcttactgcagcatcttctaacagctactagtcttttccaggatgtcgagacatctcatgtgacatcagctttttgctccccctgtcttcatgctcttactgcagcatcttctatcagctactagtagcttacatcagtcatcaacagcagcagtctccccctcaaaatcatgaatcatgcatacatcgnatcctacttctcanaatcatacatcatgcataatgctacta

SEQ ID NO: 36529 - DNA, 215 bp, Glycine max
acagaccggaccttaaggatgcgctgcagctgtttagcttcgcaaacgttatcggtgtcatgatagtaatacataacctgaaatgaacaaacttggaatcaacaatcattaactcgagccgtgatccgataataagacccaaatggataagcttgacaaatcaacaatacttactcgagtcgatgatcatataattaaactcaaatgaaataaaa

SEQ ID NO: 36530 - DNA, 375 bp, Glycine max
  unsure at all n locations
aactcggatgtccgattcaggcgcataatatattgagacttttgatattgaataacagaagctctcgagagattcgaatggtcataacttttcacacggatgtccgattcgggcgcataatatgtcgagacgctcganattgaacaacggaagctctcgagaaattccaatggtcataacttttcactcggaggaccgattcaggcgcataatatatcgagacgctcgaaattgaacaacggaagctctcgagaaattcaaatggtcataacttttaactcagaggtccgattcaggcgcataatatatcgagacgctcgaaattgaacatcgaaagctctctagaaattcaaatggtcataacttttcacttgg

SEQ ID NO: 36531 - DNA, 370 bp, Glycine max
  unsure at all n locations
tgtctttaattccaagttaaatggtattatggagtaaaatatacctttcgaagttgatcaaatccattaagttgattaagcagctccattagcgttctctgaatttcacgatctgcacttgttccctcattgaaacgacgacctccaatggcatcaatctcatccataaaaatgatgcacgactaatcaagaaaagtatagatttagaacatgtntaaattagtatgtgtaaacctataggaagacaatttcgcacaagtacctcacctggtgatcacgtgcataaccaaacatctctctcattaacttggcattttctccaatgtacttgtcaattatggcactggccgaaacaacctacatcagaata

SEQ ID NO: 36532 - DNA, 421 bp, Glycine max
  unsure at all n locations
tgatatttanaaaaaatgtgttcttcattctctatattaacataattngaagtaaagggagtatcgttggcttcattcctcacctaccaaatagaaactactgtctctctgacaaaatcatggcctcatgggccataatatgaagggaattcgaaaattaccagattccatacctcattgattaccggaagaccattgattctataacttacaagagcctccagagttgtaatccaaaaaatatataaataaagtaaatcacatgatttanaactatatagaacattgagttaccttcatcaacggtaatggtgtgtttgacaacatgcgaatcttgcttctttgtcatgaaatcagcaacggtgtaagttccatatagtagcaatgacgccaaaatgcaaacacatanaaaaaagaatct

SEQ ID NO: 36533 - DNA, 343 bp, Glycine max
  unsure at all n locations
tgtcttacttttcaactcangccgagctcaagcctagtgaagtttggcttgacttatttccacccctaatagcaggtagccaaaaatagttcttttataattattttgtcctcatattttttttaatattcatgtagaagaagagtacagtcttgatataacagttaaattgtcgtcacctgatatacatagagagtttcgtgttacctctattgattatgcatgacgtgttacgtgatagtacatttcattttcttagtttaattacttggcgttccataaagtgaaatgcacgtatataagaatatattaatggcatgtcaatgtcccctttaatcaaatg

SEQ ID NO: 36534 - DNA, 421 bp, Glycine max
  unsure at all n locations
tattacttntagaccaaatagaaactatattctcatgtaatttatagaatgactntatngaaaagatgcttataatgtgatcgtattangataaagatgtattcangtcattggctaaaatttttatacataggttaaaatgtaattctgatttctttatttttataaatccatgattttagtttccatcttttaaaattgagatatttagtccttcaattttctaagattcttaattttggtcaattcattcatttgagatggttaattgttaattgattaacgttgatcatttatctggttttttattctcatttttttattaccgagtaaaagaattttaaaaaaaaaatatttgacgatattggtccnctgtctacctggtgagaatcccaaagctgcccaaatatanggatctatg

SEQ ID NO: 36535 - DNA, 397 bp, Glycine max
  unsure at all n locations
ttctttactttcttcttgaaacaacccagnattctttgtcctaccaagccactgttagctctaaataaatcaaaagatttgaagtttgtttgctcactgactaattcttaattgccttatagacggatatgaaatctaagctctagtattttctctttacatatacaaagtgttttgaaagcgtttcaaactttacaagaatatacaaaaggctttatacaaaaataatttgaatgatagcgtgtaagttcatgtcttggttccttaaagtttctagtatttataggtcttagtgtctattgtctctaaatggatagatntcttcacttgagcttgcatatgaagattgtggccattgaagcatttaatttttgtattaaatgctcatacttcttca

SEQ ID NO: 36536 - DNA, 421 bp, Glycine max
  unsure at all n locations
agatgaggaagtgtagaaaggtgagacttcttgtttttattttttgaccacagagtggtacctggagatatgtcgcatgggtcaagagaccttgnggacgtcaggtggggtgccattgcccaaaaccaagcttgaccaatcccgacccaacccgggcatagtcagtcagtgagaacctgtgatgtacctaaacaggcgagctcctggcagtcaacagataaaaggaacaaaaccacaaagcaaggaggcttgtgtggtggctgaccagctgtgaatcttgtgtgatatatgagttatggtctctggtaatcgattaccaagggtgggtaatcgattacaaggcttanaaatgaagacaggaggctaagatagtctctggtaatcgattaccaaggggtgtaatcggttaccaggcttgaaa

SEQ ID NO: 36537 - DNA, 424 bp, Glycine max
  unsure at all n locations
agctntntgtattagaaacatgggaccaactcattntatttcanaaaaagaagtcgtatccagtcaaggtctgagagaccatacaagtttcctaacgatttctaattatgtgggccattaagtctatcatatgctgacaatagccgagaagcccatgaatctcttcgggggcggagtaggtgtctgccatcgccttggccttggctaacaatcggggaagttcttgactcccgttcaaggtaagagcaaaccgatccatccacatggttgcctcttggtgtaaagagtcgatcacccttcctctagcctctttttccgcgtatacttgggcatattcgtccgcaatcctatgctcgtgggccgcggctagacctaactcttcttggtacttggcgatgatagctagcatgttggtctccgtctc

SEQ ID NO: 36538 - DNA, 397 bp, Glycine max
  unsure at all n locations
ntcatctagccaagattntacaaaagtgttacaacatatcctatcggtttctaattatatgggccattaaatctatcatgtgttgacagtaattggttagcccgtgaatttcctctcgggctgaacacacttcggccatggcccttgctttggctagtagtcgcgggaggtcttgacttccatttaaggtcaaggcgaacctatccatccacatggtcgcttcttgatgcaatgcatcaatcaccctccctcttgcttccttctcggcgtatgcttgtgcgaagtcctctactagcttttgctcatgggtcanagactggtttaaatcttctttgtactaccctattatagctagcatgctttgctccgtggcttctcaaactcgggagccaatctg

SEQ ID NO: 36539 - DNA, 390 bp, Glycine max
  unsure at all n locations
atctntactttagattntagtaatgactcactaacctagaattaaaataacttaatgccattaacctagggaaataaaaaaacttaatggctgagtgtaactgaaattgtggcaaccaaaagtcacccccaacagccaacaagtcagccaccatttggtctcccaaaaggctgatgcctatgttgccaattgggcccttattacaacttgaactaaacctaactaaagcccttttagttgattaacccaaaacatatttttggtcagccaactttacaaggattgtgccattatttagacaaactaaacactctaaaattgaaacaaagtggtgtcatttagtcctcctccatttgggccatgatacaactcacaacccttggacttttc

SEQ ID NO: 36540 - DNA, 419 bp, Glycine max
  unsure at all n locations
acacttagatactcaagctttagcnattcaacgaaataacttttattcgatgcttgttgatcccgtatatatcgagacgctcgaattgataccgaactctgacaaattcaaacgaaataacttttactcgtatgtctgattgagtcccgtntatatcgagacgctcgaaattgaataccgaagctctgacaaatcaaacgacaataacttttactcgaatgtccgatgagtccgaatatatcgaaatgctcgaaattgaatgttgaactctgagcatattcaacgacaataacttttactcggatgctgattggtcccgtatgtatccaacctcgaaatgatgtgaactctgacacatcaaacgacacaattttactcgatgttgattgagtccgtaaatatcgaacgctcaaatggaa

SEQ ID NO: 36541 - DNA, 362 bp, Glycine max
  unsure at all n locations
aggatttcanaatctgtcttctatgaggacttntcaccaacactttgtgaatcaagaccacccaaggcttacccatccatgcagaagctaaacaatacttaacacctttnacaaatgtaacaaatgacaatgcttaccaccacacatgcaaaagctaaatcatcaaaaaagcctaaaagctcaaacataagccaaacagccnatatcatgaacatgaaagataatcaccaacagttgggtgcagctttaaataatcaagattcaacagtaccttaccttcaaatctcaaagcattaatcaaacttgtagcaaactggcaggctaactgaagacctgaactacaactcagcatnatcacatac

SEQ ID NO: 36542 - DNA, 382 bp, Glycine max
ctcaagcttgtatcttttatgatgaagcagctatgaaagtattttcactatgtgaggctagctgcataaatcaaaagacaccattgttttctatcttcaactaaaccctttgctagtccatttagataaaatataaacataaaaaaaaaatccaggttttcatgtctactctagtcatgatgatcaggttttgggtaatgaaacacaaataactctgaaattttttgagagaactaaataagaaaaatcctaacaataaggggaaaaaaataattaagaaaatcaagagatgtacacattacagatgtacaagaaagcaggatagtgagacccctagatcaaccaaaaaaaggatatttagatttccaaatgtttttattat

SEQ ID NO: 36543 - DNA, 206 bp, Glycine max
  unsure at all n locations
atgaattgcgttttcgttcatgtgtcctccaccctcgagttcggagctatgcgtagtgattgcttagtgcaattctccattctcaaactttttcggagccccatgaattatgtnntcgttcatgtgtcctccaccttcgagttaggagctatgcgtagtgattggcttaggcaattctccattctcaacctttttcggagcccatg

SEQ ID NO: 36544 - DNA, 374 bp, Glycine max
  unsure at all n locations
tgngatcaagccttcttggccttcaagaagactgttgccacatcgccattcctaagttgacttaagccaagagtacctttactcttatacctctcaatagctgacgaggttgtcagctcaaccctcgtacatgaggaagggaaacaccagcttcccatatacttcaccagccgtatccttcatgatgtcgggaagcggtatcagatgatagagaaggtaatgttagcactcataaaagggttgatgacacccttgcgcaaatgcctaaacagccaagaagtagattatgtcatgcgagagctacatgaaggaatttgcggtctctataccggggcacgctcccttatgacaaaggtggtgtgtgtcatctagta

SEQ ID NO: 36545 - DNA, 375 bp, Glycine max
  unsure at all n locations
agctntctttatattctctacccttctgcctcgtgtaagggttaatagaaagcactattggaaatcagaaaaaaattactattccctgataagtaatccaagccaaacatataagacttgttctgttacaagataaacctcttgccattatacttctcacccttttcttggcaccctaattaaacaagcccctcatgtaaatggtgcaaaaatctctcttctaaacgaagtattgctttgaacctcacatgttagataagggggaaattccacttaattttactacccacaagttccatagccatctccatgtaaacgttctcttttctatggttgttgtagaggaaagactgttgatgacaatatatacattta

SEQ ID NO: 36546 - DNA, 429 bp, Glycine max
  unsure at all n locations
gccttcanagcccaccaccaacatctatgccagatanattgttaatatataagtnggaaagctgtggatttgaaagcattctggtgtaagtgatgggattagcgttcttganaactgaagactcattacccataactaatgacccagaagaaccagcttctgttgttggtaagcagtatgagacaactcctccaaatgtggcattagtttgagataccaatgagaggtaacttcttcccaaccccataaggccagagactcctccaaatagacctttgttgttcctaccgacaccaaatacaaaatcactcactgaaacacctccaagactaagtgcttcaacacctagctcaccattagtgtaagatccatcaccatagttaaccacatagttacaagttgatggattactacttccacaggctcctg

SEQ ID NO: 36547 - DNA, 423 bp, Glycine max
  unsure at all n locations
agcttatgatttaagatatcgacttacatgtaattcatgagtcataatttagtaagttacaatacattttatgcaatactaactagtataaaataacattaatgtgtgccaccaagcacttatagtgaacttcaatgaaaacttttcatttattaacttgtaaccggtattcttaaaacatttattgacaagagtgctgctaaattttcttatgataaaaaatgagaggattaaactcaagtttcactttttctttcttatttatactattagcatcaatttgtagatgcaattggctttgatgatttgatgatgatcatgatgatgtgttgcaattgatgcaaatgggctnttcaagattaaaattcaagacaatacttcaagattagcagtcacatcatcaagatgatcactagaatatta

SEQ ID NO: 36548 - DNA, 437 bp, Glycine max
  unsure at all n locations
tagctcatanatgtgttcacatattaattaaacgaaattaagttttgtttattntaatccgcaattcttatcaatatatataattngtgatacatataccgaatgattgatttattttcacatgattgaagcttgtgttattntcatacaactctcanatggattatgaacctccattcctcgagacctacaagacccttgttctaaaccaccttgatgattcaaagaatgagtactcctctttggtggagagatcatgtgaactaccagtgatcgatcttggccagttcaatggcgagagagacatatgcatgaaaaaaattgcaaaactgctagtaaatggggttttttccaagtcgttaatcatgggattcacaggagctgctgaaaagccttgatttgaacaaaagaaattgttctatcaaccttttttgaat

SEQ ID NO: 36549 - DNA, 155 bp, Glycine max
taattactctgcatcttagccttgctatcaaaatgcatcggcactttggatttatctatcataccactttgagaattgattctcacataaggccattatcttttttcaggtttcctctagcgatcaacaattttcttccataaatgatcaaaaag

SEQ ID NO: 36550 - DNA, 365 bp, Glycine max
  unsure at all n locations
gatgatgtcgagaagaaatcacatagtttgtatcatcaatttgggggagaatgtgaatgcatgtatacataattntgatgataaagactcaaaataaggctcatttgcttcaagattaatacaagattgtttcaacaaacaaagccttgattcaagatttcttcaagatcaagccttgtcttanaacanaaggtttcaagtcatccaaggcacatgtaatcgattaccaatacatgtaatcgattaccaatggtttgaaagtgtgtaatcgattaccagagactctaaacgttgggaattcagaatttaaatgaagagtcacaactgttcaagacatataactgtgtaatcgattacactaatgc

SEQ ID NO: 36551 - DNA, 151 bp, Glycine max
catgcccaactcccttgagtagacagtagcattggcggctatatcgaatgtggcatcttactccacatcatatctctgcgtgcgtcatgcatcatcatgagaaagtgagaagaaaactatacaagtcagaaaactatcttcagaaagaaaa

SEQ ID NO: 36552 - DNA, 458 bp, Glycine max
  unsure at all n locations
ctatcttttggcanacaacctaagacaatgataacatttcgaataataaatattggaatatgtaagataaaaattgcttaataggattgtaagtatagtataccactgcatgttggggcatctcagcatcaacaggtgctgctacaggtggatatggcatgtttgttgtatcatcaggcaacacaagtgggtgaggcataactattgtagaatcgtgtgtgacaccctctaccccgacatacatataaataaaaaaanatataaaattgtggaatttaattaaaccaattctattcaaatcacgtaaacaaattcacgtaggtaacaggttcacattcgggttaatcaccanaccaaaaacttatcaattaagggtatgaaaacatctccgacttanaacaaggccatccaaaactccaaagaatgactaaagactcaccatgtgaaacaatatgata

SEQ ID NO: 36553 - DNA, 431 bp, Glycine max
  unsure at all n locations
agcttcaacttcagaccatttcncaggtgctggaactacttcacatggacttgatggggcctatgcaagttgaaagccttggaggaaagaggtatgcctatgttgttgtggatgatttctccagatctacctgtgtcaactttatcagagagaaatcatacacctttgaagtattcaaggagttgagcctaagacttcaaagagaataagactgtgtcatcaagagaatcatgagtgaccatggcacagagtttgaagactgcacgtntactgaattctgcacatctgaaggcatcactcatgagttctctgcagccattacaccacaacagaatggcatagttgagacgacaaacatgactttgcaagaagttgctatggtcatgcttcatgccaaagaacttccctataatctctgtgctgaagccatg

SEQ ID NO: 36554 - DNA, 449 bp, Glycine max
  unsure at all n locations
ntacacattgtgttgngtattattgattcctacgattgttaattattacttcnatncnnaccttaaattattactttcacgaattntgattatatttctgagaaaattttcctagaaatgttattattaaaatattatttgaatattattctcataaaaaatgtttggtaaatatttttaagtttattttaatttaaaaaaaatattaaatagataaataaatgagatagaataagaggaaagtggaaaattattttaaataatttcatgtgaatataagatttccacccttatacatgagaataagaaaagatggaaaaatatatgtacaatggatntgtgagaatgaattaaccaataactttcttgttatntcaattttatttaaattatcttacattctacaagatattttcaaaaataacatttctaatcaataaatttctaac

SEQ ID NO: 36555 - DNA, 421 bp, Glycine max
  unsure at all n locations
tgcttggttctttgtaccttgaattgtacttgacatgtaaatgttgagtgaatctgatcatttggtactcgttacttaagaaatatataagaaatatattttacacgttcttattagacaaaattataaactcataaagtttttcaaaaggcgattaacagtattgtgaataaggattatcgtagtaaaaacaattatattttcttttctttttctttgtaatttataaaaatactcatattaatccattatcttttttattattaatgattctagggccttaaaatatgatttcgtagaaagaagtttctcttccttttgcagtaatctacttcggtctgtaattttgtatatctcacttttaccgtaacgcaatagganaataaatgagttataaataatttgtgttgactttctagtg

SEQ ID NO: 36556 - DNA, 347 bp, Glycine max
  unsure at all n locations
tggatgggaaggtgatgggcttcagcctctcataatatcatttctnttanggtatacattaatgggttacagatcttctatacaatatcagttacgaaaattaggttgaggttatgacaatggttgcgcctctatggtttagagatatcttgtgacatatgtaacattctattgttaccactagagttagattccttagatttagcagagggttctttgctcctccggttgtgctatagtgttgatattggactagcttctgagttgcgactgaggtttgagccatttttgtcaccattttttttattagagagaatgaaaatntaatagctattctttcttgtact

SEQ ID NO: 36557 - DNA, 428 bp, Glycine max
  unsure at all n locations
agctntgatgatatggtcttcaccgacgaaaggatcatagtgggtctaaaaagaggcaaatctgatcatcatgctttgataaatgccaaaaaaaactagggcaaatgaagaacaccacctttagcacaaacctaaatcaaccacaaagtctgtctaccgcacttccaatgacgaacaccacctttagcacaaaccaaaaacaccaaccaagaaatgaattttgcagtgagaaagcctgtagaattcaccccaattccagtgtcctatgctgacttgctcctatatctacttgataattcaatggtagccataaccctagccaaggttcattaacctccatttttccgagaatacgactcgaacgcaacgtgtgcttgtcacggagaagcgcctgggaattccattgagcattgtagggctctgaagca

SEQ ID NO: 36558 - DNA, 444 bp, Glycine max
  unsure at all n locations
tatgcgcatatttccttacgaacgttctcttgcactatacattctattatttaagaaaaatgcacccatatacaatcaaggcagcttcgttacctagattatttacacgtacttccaaggtgtatttgttacttacatcacacacatctccttggctaaattcacatacatgcacactcaaagcattttggggtaccaaaaattgcacatgtgcacatcttggtatttctaatacctatacatacacaaacttcatgatgaatcttgactatcttcacaaaaaggtggctacacttcatccctttttcaagtttttgctacctanagccgcatgcaaattcaagcatantttcctttgctgactaaaattgtattcaaattaaaaggtatatanttnttttggaatatgtnttcttcacataacatgccacatatntatatata

SEQ ID NO: 36559 - DNA, 390 bp, Glycine max
  unsure at all n locations
agctttctttatanatcttccttgagaagcttctttgagagaacttccttgagaagctagagcttagctacacacacccctctcataacaaagctcacctccttgagaagcttccttaagaagattcctaaagaagctagagcttagctacacatacctctctaatagctaagctcacctccttgagatgagaagctagaacttagctacacaccccctataatagctaagctcacccccatgacaaaaaaacatgaaaatacaaaaaagattccttactacaaagactactcaaaatgccctgaaatacaaggctaaaaccctatactacaagaatggacaaaatacaaggcccaaacgaaggaaanacctattctaatatttacaaag

SEQ ID NO: 36560 - DNA, 463 bp, Glycine max
  unsure at all n locations
tactcagctcgcttggtgggcttctatggaggcaggatcnnngttctcattgnatgttctttaatggngattttccaccatggagatgcagcggaagacaaaggagaagaggtgagaggaggcgccatccactanggaataagccatggaagaatgagcttcaccaccaagtgagccttagataagaagcttggaaggatgcttcaatggaggaaaagaaagagggagagaaagagagagggggggagcacgacattgaaggaataaaagagggagagaagtggaactttgaagtatgtctcacaagactctcattcatcanagttacaacaagtgttacacatgcttctatttatagactaagtagcttccttgataagctntcttgagaanacttccttgagaagcttctttgaaaaaacttcttgagagctagacttagctaccacaccctctctaacta

SEQ ID NO: 36561 - DNA, 402 bp, Glycine max
  unsure at all n locations
agcttgtgatantntcaattctgcatatatccctgtaagtgagctatctattgattntattttgtttatagcttgctctctccanatgggtcgacgctaagcctgaaaaacctagtacgcctcttttcttttntcattattttcatattagtcaatcccccccccccccctcattcccctgaataattaaccctaacattatgttcatgtattctgatcaaagtgttcaattttctttcttcagctatntgttcagacaccctagagcagtgatctggaatagttagaagctataaatgcataaatctttgagatctagaagttcattgtcattttgaacctttctgtgatgtctaattcctttcttttttctctctccatgaaatggaacatgaactggat

SEQ ID NO: 36562 - DNA, 453 bp, Glycine max
  unsure at all n locations
ctcaagcctttcanatgaaatgaacaagngaatagtttctgttcaatttcacatgnggngttcacacacaagtttatgtgaaggatgcaattgcaacaattcttaagagattagctagcatggcacaagttaaataaaatcaaagtcacctcattcttcacaatcaaagtatttctctcaaacacacaagtgtatctaggtgagtgtatctctcaaaccctcacaaataaactttgcttttcatttattttgaaatcataaaactaccctcatatgcaaagatcaccaaggactttattgggttgtaagttgtaacttggctggactacaaggagatttggttctctacgacagcatattcgcactatatgagaataagagagcatatgtcaacaattgagcaattcattcattattttctttctttctgacaatctaagtaacatcaacaca

SEQ ID NO: 36563 - DNA, 419 bp, Glycine max
  unsure at all n locations
agcttcaccttcaaganagtgccttggataagaagcttagagagaaaccttcaatggaggaaaagaatgagagagagaggagggggagcacgaaattgaaggagaaaaagagggagagaagttgaactttgatgcgcatctcacaagtttcacattcatcaaagttacaacaagtgttacacatgcttctatttatagcctaggtagcttccttcataaacttccttgagaagcttccttcagaagctagagcttatctacacacatccttctaatagctaagctcacttccttcatatgagaagctagagcttagctacacatacaccctataatagctaagctcaccctcatgctaaaatacatgagaatataaaaaagtccctactacaaagactattcanaataccctagaatac

SEQ ID NO: 36564 - DNA, 412 bp, Glycine max
  unsure at all n locations
tgtagggttaaagtctcacgattggcacgttctcatgcaacatttgtnagncgaggctatacgagacatcttgccaaacaaagtcaggttagcgataactcgcatgtgctttttcttccatgctatatgtagcaaagtcattgatccagtcaagtttgatgagttggaaaataaggccccaattatactgtaccagttggagatgtattttccctgctttctttgacatcatgattcacttgattgcgcatctggtcagagaaatcaaatgatgtggtcctgtttatctacggtggatgtacccggttgagtgatacatgaagatcttaacagggtatacaaagaatctatatcgtccagtcgcatctattgttgagaggtacattgcaaaggaaagccattgattttgttc

SEQ ID NO: 36565 - DNA, 407 bp, Glycine max
  unsure at all n locations
gcttgcttgtgangcttctatggatgctggatctttgagcctcaatgaggtccttcaatggtgatnttccaccatggagatgcagcggaagacaaaggagaagaggtaagaggcggcaccatccactanggaataagccttggaagaaggagcttcaccaccaagatgagccttggataagaagcttggagaggatgcttcaatggaggataagaaagagagaggggggagcacgatattgaaggaagaaaaagggagagaagttgaactttgagttgtgtctcataagactctcattcatcanagttacaacaagtgttacacatgcttctatttatagactangtagcttncttgagaagcttctttgagaaacttccttgagaagctagagcttagctacacac

SEQ ID NO: 36566 - DNA, 373 bp, Glycine max
  unsure at all n locations
tagaaactaaacaaatgttttcaacatcttgaaagagatttgaggatcttattanaattcatcaagctcatttagttgattttatcctggaaaccacttcactgggtgatgtacaagacacctttgtttgtaggaggtcaaggcattactagacgaanaggtatccagtggacgataaattcttcttaaggattttcaagacttagaagaaaggttgaaatccttaaccatgactcttgaaaattcagaagtagaacacaaggaaccccacagacaaatctagtcatggtttcaaaggcaaaaaggttgtgcatggtgaagaagttactatttgttatttctatggaaaggtgggtcatgagactcataaatg

SEQ ID NO: 36567 - DNA, 86 bp, Glycine max
cgcgactgcatatgtctggaagatctcatcccaaatacaccgactaggaaccggggcatgagctctatatgctgctatgcccttca

SEQ ID NO: 36568 - DNA, 700 bp, Glycine max
  unsure at all n locations
ccgccccccccacgcccgccttganaactttagccaattgcgagacacccatagnantannctcagctcgcatggccctgcagggtnncgactcttagagggatcnccnccgggtacccgatgtttctgaatttcgctctctatnagtgggagtnncgtatntacanatntctacgtgggcnnctgtcgtnntttacanaccgtnncgtgaactgggnngaaaacctctnggcngnnttacctcaaccttannatcgcnncttggcagcnanncatccccnnnctttcgcncaagctgggcngnntaatagcaganagaagagcncncgcnacncnngatctgcccnnttcccanacnnagttggcgccagcnccctgaatgagcagaaatgagcngcnctaggatgcccggtatntattcttcctttaccgcccatctgtagcnngagtatttcaccacncgcatttatggtggcacntanctcagnnnacaatctggcttctggatgcnncgcatnnagttaaagcncangcnccncngaaacaccnncgccannnacactccgctttgacngccgatacnctnctntgcgggncngcntncggaatatataccntcgtngtaacggtactgcttatgcaaaacgtcattagcgaatgagctcacgaccttcattagttcattcacagaacaaacccg

SEQ ID NO: 36569 - DNA, 437 bp, Glycine max
  unsure at all n locations
agcttgtgtatcggttctcctcanattaaaaccacagcaagaaaaacatatctctgccgatgttgctgccatgcatcagtgtagagtcttccaaaaaatccctgagatcaccattcgttgtacacacaatcaacataagacgataatgtcatactgactatgtctatccgcttcatcacctagaatgaatattttttaaataattaaatatataaattattaaaaattgtaataactaaatatttataatatttgaattatatctaaaatctataataaataatttatgttgtgatgcattattacttttaattattgataatttcttttaaaagatattcaaattcaagttgacactacaaatattataaattatagatggaaagagataacagttacgtctaatcaatatatatatatatatatatatatatata

SEQ ID NO: 36570 - DNA, 352 bp, Glycine max
  unsure at all n locations
actcaagctttgcatggtgtctgaaatgtaatgatgtcattattncctttggatttaatgttaatatcgcagatgggcgtacatatctaaagatcagtgggagtaaggttatttttctaattctgtaagtcggtgatatcttgtntacaactaatgatcttggtcttcttcatgaggcaataagtatttctctagacactgtgaaatgaaagatatgggtgagacaagctatgtgataaggatagaaatattctgaaataaatcataaggattgttaagcttgtcttagagaacatatatcaataaagtactagagagatttaggatggaagagtgctcatcatcacccgtt

SEQ ID NO: 36571 - DNA, 434 bp, Glycine max
  unsure at all n locations
agcttaagcttcttcaattgcacaaggctcttaatatttaaagagtatccttgtggaaccttaacccaacgaagacactgacaaaaacttatgttctcctttntggacaaagtatgataagctgggggcaagtaaatnttcttcccatcagaccttggatgcaattgtgatcgtatccccatctcagctagatcttgacgggtattcaacccatccttcgtcttgccttgaatgttaaggagcatcccaatcacactgtcacatacatttttctccacatgcataacatcaatacaatgtctaacgtctagatcagaccagtacggaagatcatagaanatggacctcttcttccatatgcaagtcttactgttatcccttctttgggtctttccaaatatagtattcaggtgctgaacccgtattatacctgc

SEQ ID NO: 36572 - DNA, 355 bp, Glycine max
  unsure at all n locations
tcacagttatggagagctaaatcctctgttggttcttccttgtatgttcttgatgtanatacctgtatatctacttaatgatgttttatgtgttctctgtgctatcagtatgtcattntagtgtgttnttgccttgatcacatagatgcatngcttgttaggatcattcaacagtggaaactggtttgattcttagaacttgataggaaatggctagtttatcgtattatcatgagggatcagggtacggtaacctagttgtttgtatgtttgtcttattgtgattctggtcgagtntagtccaacaataggaatctaaagatgatgctngatcgggattaggctagactatcat

SEQ ID NO: 36573 - DNA, 517 bp, Glycine max
  unsure at all n locations
nnnnttaggggttcccgctgaacctagnntcntgnanancnnacaatgacccaggatcccttagagtcgacctgaggcatgcaagcttngctttctcaattaacccctttgaaggtaagtgggttgctccgctgatagtgatctaaaccatggtacatagttactcctccaccgactacctgattggccataacttgcgccaagttgttcaaagcctcggtaatgagtcatactcgctcatttctcccacgcattacttcctatgtcacgcaagcaacaaaactttgaaaagagaaaaagaaacaatatatatatatatatatatatatatatatatatatatatatatatatatatatatatacgcacacaataagagctcactcctatttatacaaaaaagcacatcgcgtaatagttcacaaagaaacacagaacactgctacacacattgcaataagttctacttgtcagaaccactaaattaccaccgtctacccgaccaaaaacaaacaan

SEQ ID NO: 36574 - DNA, 394 bp, Glycine max
  unsure at all n locations
ttactccgcacactggtggcctcttgagaatgaagcggctatttctccttttaatgacgcatggacactcatccctgacccaactataattcgtgcgaaaggtcggccanatcaacaaggataaggaatgagatggattgngtcgaaccatctcagcaccgacaaaaatgtagtagatgtggagccgataggcataacaagcgtcgctgtccaatgcaatctaagcatgggagttgtttaaatcattgatttatgtatgttagtgaagtgacttgtatttgtttaagttctcttaaatgtattaaatctgtcgggttgaatgaatttgctagataataacattacttattttggtttgtgtacattactcattttggtttgtatacattactta

SEQ ID NO: 36575 - DNA, 243 bp, Glycine max
atgggatgccatgatgtttatggtctataatcctaactctccgctctacagagagcacaaagaccactccgaaattgcacacagtggtcaatgtctaaacatatcattgttacagaagtgaattctgtaaatcatttcatatcacttttatttacctaagttattgctttcaattcataaatatgtaacttcgacttaatataatcaggcatctaactgaaacaagtatgcgagctgggaatt

SEQ ID NO: 36576 - DNA, 444 bp, Glycine max
  unsure at all n locations
ctatcaaccgctgcttaactccttaactgcacaagctctgaaatatttatattttcttgaggaaccttcacctgacgaagacactgacaaaaacttatcttctccttcttggacaaagtatggcaggctgggggcaagtaaattttcttcccatcagaccttggatgcaactgtgctcttatacccatatcagctagatcttgacgggtattcaagccatccttcgtcttgccttgaatgttaaggagcgtcccaataacactgtcacaaacattnttctccacatgcataacatcaatacaatgtctaacgtcaagatcacaccagtacggaagatcanagaaaatggacctcttctttcatatgcaactctgacttttatactttctttgggtcttccaaatacagtgttcatgtgttgaacccgtgatatacctgctcacc

SEQ ID NO: 36577 - DNA, 377 bp, Glycine max
  unsure at all n locations
agctnngnttcagatattcttcgngganngctgcatnctcgtcccttgtcgcatgattgccaaaatccaataactctgccactggattatgtgcttcttttggacaatttgtggaccaaacaaccgtgttgttgtgtgtcatgaccaaattgccagaactgtacagtctcaagatggcagaggaatcatttattgggttgccaccgtttgcaacccatacaacatgttgtgacngattattcttgaaccaaatccccaggtaacttttgtttggaagtccaagattgaagaaaccaagctcaaagattccccttgtggaaaccatggtctttccaaaacttgaggattgggactgtgatatggatgatgtgttgtct

SEQ ID NO: 36578 - DNA, 398 bp, Glycine max
gacctatagatactcaagcttgtgcgcatttgcgatagtgatgttgccggagatgtttatgttatattatgtaccaccggattcgtattccttatgggtgatagtgtttttacatggagttctaagaagcaaggcattgtgacactttctacttgtgaagccgagtatgtagctgcaacttcttgcacatgtcatgccatttggctaacaagattgttggaggaacttcacttgttgcataacgaaagcacacagatctatgtagataatagatctgcacaagagcttgccaagaatccggtgttccatgcacgatgtatgcatatagatacaaggtatcatttcattagagagtgcattaccgataaagaactataattgactcatgtgacaactca

SEQ ID NO: 36579 - DNA, 377 bp, Glycine max
attcttttattcaaagctcatcttggtggtgaagctccttcttccatggcttattccctagtggatggcgccgcctcttacctcttctcctttgtcttccgctgcatctccatggtggaaaatcaccattaaaggacctcattgaagctcaaagatccagcctccatagaagctccacaagcaagtttccatcaagtggtaatcagagcacaagagcttcaataggtgctccttaaacctccattaattttttgctttaccttctcttccattgttgtttcttcattttcctccatgtatctcctcacatgtcttgtgctaaattttttaacatgattctttagagtctacaccgattaaacttgctatagaagcta

SEQ ID NO: 36580 - DNA, 423 bp, Glycine max
  unsure at all n locations
taagctccttcaactgcacaaggctcttaatattttattagtatccttgtggaaccttcacccgacgaagacactgacaaaaacttatcttctcctttttggacaaagtatggcaggctgggggcaagtaaattttcttcccatcagaccttggatgcaattgtgatcgtgtgcccatatcagctagatcttgacgggtattcaagccgtccttcgtcttgccttaaatgttaaggagcgttccaatcacactgtcacaaacattnttctccacatgcataacatcaatacaatgtctaacgtcaagatcagaccagtacggaagatcaaagaaaatgaacctcttcttccatatgcaactcttacttttatccttcttttgaggtcttccaaatacagtattcaagtgtaaacccgctcata

SEQ ID NO: 36581 - DNA, 334 bp, Glycine max
  unsure at all n locations
cataagatcattgttcacatctgaactatccacaatcaaagtgctgtcttctgaataatttctggctgaatggaactggtaaactctgttggcatggctgtaagagacctaacactgttggatatacttgaagtatcagcagcagcaccacaataattgccaacaacagcatctaaaagatattccagatcaacatctctgggacactccaaacctttaatatgagcatgctctcttntgttgatacaagagttgattactgtatgtttcctcaacagagatacatattgacatatatttgcctgtctctccatatgaaactgatccaagtgct

SEQ ID NO: 36582 - DNA, 194 bp, Glycine max
acctgtccttctgtgaactatcacctatgaaacatgattccattctaagaattggactggaatgttgatatggggggttgtatgaactgttgtgcttcttcatagtttgcctctgagaatgttggaaagtgaatctataagtgtttaagtagataaaaaaacaacacataaattaaagaaaaacataatgtata

SEQ ID NO: 36583 - DNA, 434 bp, Glycine max
tcttccccaattttctataaatagggggagaagtgtttagattagtgttcaccccttaggcacttctctctctttcgaatttgcttaagaaaattgtttccgtgaagaaaatccaagccgaggcgcttccgtaacgtttccgtaacgtttccgtgagtgatttcgcgaaggttttcgaccgttcttcgacgttcttcatcgttcttcagtcttcaacgggtaagtacctcaaaccaagcctttcaattcattctatgtacccgtggtggtccacatttggtttcatgtatttttattctcgttttcatttactttttatacccccttttgacgtgcttaagccatttatttaagtcatttctcgcttaaccttaaaataaaataaatttccaccgatcgtttgaattgaccatccgttactttggttgaaatga

SEQ ID NO: 36584 - DNA, 123 bp, Glycine max
  unsure at all n locations
aactaacgcacacctgacgnngntttttgnggggtggtnnnnnnnnnnngtgnggggggggggggttgggggggggggggggggtgggggggtgggggggggggggggggggatgtggggggg

SEQ ID NO: 36585 - DNA, 453 bp, Glycine max
  unsure at all n locations
nntgagggttatgtggttgttattgcaatatctatatgagaatacagagcangccttgaagactgcaaaagttatttgcatagcaggattcttttggcaaagggcgtccctcctcaaagagtttttgatttgcaagccaagcttgcaaagctntggcatcctttgggacgttggcatatgatcccaattggaaaaggctatttcaattcttctttctccttagttcaagatttacgtaaggtattggtggtagggatttggaacctaaaccctagcactctgaggcttttcaactgaaccccanactntaaccctaatttggtgaaacaaaccaatacccagagttgtattcgaattctagggttagcacanaagtatggagacaagccatcctattctccatcgcaataggtgttgggatcccctctgcacagatgatgcantgaatagtcg

SEQ ID NO: 36586 - DNA, 418 bp, Glycine max
  unsure at all n locations
tgcttcttatttgatccagtagaggaggagcatacaacctatttcactcaagtcacacccaggaactctggcacaagagacttggtcattgccatcttgaaagaatgctaaacatgaaaaaaaggaaatatgcaaaagaaaatttgaagaagtttcaaatggaggaatacaaatctgttagcacaccaatgaatcaaaatgacaagtttagcaaggaagaaggtgttgataacattgatgaaggatattataggagcttgattggatgtctaatgtatctcactacaacaaggccaaacattctatttgctcaaaagaacaaaactggaattnttgttgacaatcaagtagccattgctattgcaaacaattccatgtgtcatgggaagactaaacatttcaacatcaagttctatta

SEQ ID NO: 36587 - DNA, 450 bp, Glycine max
  unsure at all n locations
ntanagcacagcaacacagaatctaggtgttcaacacccctttantcaatgggttttctaggtttgaaaagtgaaatttagaatgaggtaaatttgaagcaaactctcacctcacacaagtccataacatcaatctaaacttgctcaaactgaatttacacctaaaattccaccgaatcaaaatttgactcctcaacacccaaatttgccctagaaatagctctttgttcattttgatcatttgttcttctctctagcacagtccaagctttctcccaagtcctaaatgacatttcaagctagtattaactcactntaacctccatttaccacagaattcagacttagccttccaactctcanagcctcactcttttttccactcacaacaccacattctcactttctaaccctaagttaactctacccttcatctctaacagtttccat

SEQ ID NO: 36588 - DNA, 325 bp, Glycine max
  unsure at all n locations
tcctgatttccagcttgggaaattggcgagtggaggaacgccccggcatttacgcaacaagcataatgtaaacctttacggttttaaagctctatagttgggcctaggctttatagtttntccctttgttaaggctgtgtgtcttctgtttttgaatttataatacaaggatctttcttcatctgttcctggtctctacccattctcattcatttgcatgtttacttctttttctgaaacggcagatccgatgacgagtcctccgaaagtactaatacctgtgacccgcctatcgacttcaagcacgaaatgaatcacacggaag

SEQ ID NO: 36589 - DNA, 432 bp, Glycine max
  unsure at all n locations
gagtttctatggaagatggatcttggagcttcatttagttttcttggngatnnttcatcatggagatgcagtggaaggcaaaggacaacaggagaggggaggcaccatccactangaaataagccaacgaagaaagagcttcaccaccaagaatngccttggataagaagctngaagaggatgctctaatggaggacaagaaagagagaaggtgggagcacgatattgaaggagtaacaaagggagagaagtggaactttgaagtgtatctcataaaactttcattcatcaaagttacaacaagtgttatacatgcttctatgtatagactaagtagcttccttgagaactctcttaagaaaacttcttgaaaagctcttgagacacttcttgagaactagacttactaccaccccctctatactaactccc

SEQ ID NO: 36590 - DNA, 264 bp, Glycine max
  unsure at all n locations
naggtgtacgcatttcgaatgaacacggtcaaacatgggctgcactngtctgtttagactgnacctgactgctgatatatcgagctgtcaaagcctgcacgactacccgacttactgagctgaccttgctgtattacaactggctcacacttactatctttggcctcaatttttattaatacatctcaccttttatctacacatgtattcttatgctactttctgactaatctctataccctgttatatttcattcttaattcg

SEQ ID NO: 36591 - DNA, 413 bp, Glycine max
  unsure at all n locations
gcacactcagctctanaccatgcacttagttaccaagtgtccagagattcgttttgtgcatggttttttcaatctacagcaacagcattgtattttcagcttaatcatttccacagaaccaaacttgttatctcaataggaatagttcacaattaatacaaagatggaaaacatttgaattacaatggaaggaacaagttaactaanactaaaatatcactatcatattntagtatttcccaacaccacctgcatttctccacgtctaaagtgaactacaattactaagttgaaagttgcagttacatgcaaattatccaccagaaagaaggtaactggatctagaatgcacgacactgttgtaaagctttcaagctgtactgtgttagcctgctgaagcagtttatctgtgt

SEQ ID NO: 36592 - DNA, 226 bp, Glycine max
  unsure at all n locations
tcgatatattacgcgactcaatcagacatcagagtaaaaagttattgtcgtttgaatntgcaacgaccatcaacattcaatttcgagcgtgtcgatatattacgcgactcaatcagacatcagagtaaaaagttattgtcgtttgaatttgcaacgaccatcaacattcaatttcgagcgtctcgatatatgtcgcgactcaatcagacatccgagttaaaagtta

SEQ ID NO: 36593 - DNA, 221 bp, Glycine max
cattagcccacctcggcgaaaaaaaaacatgattcaccggtattgacagaaaaaaatgctggccttattcggccaggaaagatgaccgatcgaggtctaaaaaagaagcatgaccggattacgccgatcgaacgtttcctaatagatatcctccaagtattattcagggatcgaatggaaaaaacaatagccgacatcggtagttaaatagccgtgactga

SEQ ID NO: 36594 - DNA, 355 bp, Glycine max
  unsure at all n locations
agctntagttttacccttgcagaattatctaagagctgcttagattgtggcctcaaccagtcaatgaacatattcagctgtatgggctcagagaatccatgagtaggaagttttcgcagcaagctacaaaatctttctagggctttactcanagatntatctgggaactggtgaaaggaagagatgacagcctttccctctgcagtcttggactctgaganatatttcttcagaaacttttccacaacttcatcccaagtcctcaagctattacctttgaatgaatgtagccacctcttggcttctccagatagtgaaaatgaaaataagttgatcctaacaacatcttctggca

SEQ ID NO: 36595 - DNA, 313 bp, Glycine max
actaactcacctctgaagagaactagacttactaccacccctataatactaactcacccctgacaaaacatgaaatacaaaaaagcctactacaagactactaaatgccgaaaacaagctaaaccctatactactaaatggcaatacaagccaacgaagaaaactatctaaattacaaagatagtggtcaattacccaggactcaaattactaagctagaaacctaggcttcctgatttacccattattgagtttaccatgcctgcggaagatgctccaatttaactacatcatacatctgatcatatattat

SEQ ID NO: 36596 - DNA, 413 bp, Glycine max
  unsure at all n locations
agcttcttatgcanagtatataaccaaacaacaatattgtcgtgtggacacagaacaataagttgccaatgtgccctgaagaacaaaaacattagtagttacgcaattataatgcanatntttgaacattgttcaacatcaatttcacttattgattcatataagctcctaagtacacttttcgttgtgattccttgacccatgtntgaatgtaatgttgacattcttggcatctatcctttgtgttgtgtatagactgaggttcaaggaaaccatacagtgatccataacctaatcttgtgttccaatcattcataanactatttcanacatttgacataaattctgttaatggtatattgtaacgaacattaattatcagttaataaatttagcactactaaccaaattac

SEQ ID NO: 36597 - DNA, 342 bp, Glycine max
  unsure at all n locations
gcgtttttctggacaatgcgatgaattcgctaagcgtgcatgttgcattaagcgagttcatcaatattgcttgaatatatgcattntcagacgaactcgctaagcgcgcctacgacgctaagcgagttcatcttttgtggatgaacattcatctccctgatgagttgactgtggctaagcggggctgattcactaaggccaggtaacttagtcaaatttttgttgaacgctgcgcgctaagcccaacctatctaggctaagctcatttcattgcggcagccattgtgctaagcgagcctagcttgctaagcccacatacttagtgaaatttctaanatttat

SEQ ID NO: 36598 - DNA, 395 bp, Glycine max
  unsure at all n locations
tgtttgatatgattgatggngacccggngttgagagaaacgaggatatgggctacgtgggagtacgtgagctcagttggaggtgggcaacaggggatggtgggtttatgcgcgcattgtggatgtggaaagcttgttgtgcaccatcgcccgaccgccacctagtacgacatgtgatgggtaccccataatcctacaagcttgagatgaggaagtgttgaagggtgaaacttcctgcttttattgttgaccacagagtggtacctggagatatgtcgcgggggtcaggagaccttgtggacgtcatgtggggtgctattgcccaataccaagcttgacctatcccgacccaacccgggcatagtcagtcagtgagaacatgtgacgtacctaatc

SEQ ID NO: 36599 - DNA, 383 bp, Glycine max
  unsure at all n locations
tcttttggaccttgaacaggcaactaactcctctttttaaatatgctatgngctcgcgactggtccctttgttcctttcgcaacttgagttcactattgctaccccatagagctccgcgaaatttgttccggccatactcttccttgcgagccctcttggtctcttgttcaagggctcttgcggtaattgcattctcttcccgtaacccggcacactccttccgaacgtgtgtagcggccaacttgaacttctccttggcaagttttgcctttcctaactcgcttttgagagcttggacttcttcgtcctcttccggtgcttcaaaactctctttgctgacgacttttaacttggcgagccaatctaaacctcgtatatgaac

SEQ ID NO: 36600 - DNA, 353 bp, Glycine max
gtgttggtcaaataaataccactcgaatgttgcttccaaatccaagaatctgctccatgttgttgaattgatatcatgcctatttcctataggaattctgcagccattgaagcttcactatcgaataggtttctcctccaattgaaattccattcccacccttcctccttgtggcttcccatgagtctgatagtctgttgttgttgggtagaaacttgatacagcgtaggaaatttgtacattaaagttctgtccccccctatccatttgtcatcccaaaatctggtcatgtctccacaatgcacctttcactctatatgatcctttatttttattcactcctctatctgatt

SEQ ID NO: 36601 - DNA, 351 bp, Glycine max
  unsure at all n locations
gcattccctatatgttctagaatncagttagtagttttcttaaagcattacacactatatattgcgtacaacaaatatgcaatttgatccaacgtgtataccatcttggatggtaaaagtaggtaccttctggaggttggacaagcttccggttatgaggagcggccatttccttcttcaactgtgtcagtatgtcctccatggtgtactctctttgccaatttgcaagaagaccaaatttctttggttcaacctatttcattcaagtctataaatcttgtcacaaagataattagttattaagccaataaaatagactaaattgtctcataatcatacacatgagaagtg

SEQ ID NO: 36602 - DNA, 378 bp, Glycine max
  unsure at all n locations
nattcttgactttttcaaaataaatnngaaagactcagctcgaatnggattctgattatttttgcgtgaccattattaagtcaaactcaaaatataatactatggcttcaagtttaatccaaactatttttctaaatcaagagtaaataactatgattgagttaaatgtatatgcactgagcaacaaacccattggccatcacctcttaaacacgaattattctttgttttgataacaaaccaacctctcccaatgtcttctgtactcattattccaaccatgtatttaagacaaaaaccaacaggcaaaaatatattaaattgaataaaaattaaaaagagaagtccaaaagctttttaccctgtccaacattgcaa

SEQ ID NO: 36603 - DNA, 338 bp, Glycine max
  unsure at all n locations
cttggcggacacgctcaacaaagtactttcgacacctactgtacgttgatttgaccaatgctgttatgggaatgttgcgacaatccttcanaaccttattgatacattctgagaggttggttgtcatgtggccatatcgacatccttctctatcataagccatcgtccatgtttcctttgaaattcgatcaatcatgtggctatggctggactcagttcacgaaatttttctaaatcttgatcanaaatgtgctcgcaaggagtgtacactgcataaaaatagttatgaataacaantttatgtatatatgaaacttagataaacgtcaccatcaaat

SEQ ID NO: 36604 - DNA, 405 bp, Glycine max
  unsure at all n locations
anaaccgacgccacccggaggcagggctcatgtacacacacccccacctctcccagacacggaggagctgaaggcatcgcacaccgggacgaagacatggacnatagctctggcataagcatatatatataactcacgctatgtggccagtacctaccaacggatactatatatgcagctgcagttggataatgaaccgcacttacttactttatctgaagatctcattggcattaggggacaatgccgtgtgactgattgcctacccttgccggtgcattgtgctgagatatcaccatctatatccatgattcattcatcagtgctatatgagctgtataacgagccactattgacataaaattgaggtagcgtcgaacgagaggtatagtactccctttatcn

SEQ ID NO: 36605 - DNA, 240 bp, Glycine max
actaggatatatagtgactactcacaccaatggatgtgccatgatgacgcccatctaatctatctaaataagcacctgacacaacctaacacccagacatccagcccaattattcaagtgcagatgttctgactaccacacacaatcagaccctcagaatgggagacttggccaaatcttatttgtgaaaatatcgaacctcttgctatcagagattgagggactactcacacgctccat

SEQ ID NO: 36606 - DNA, 281 bp, Glycine max
  unsure at all n locations
aaaagcttnagcaaaatgggagaactgaaccagactttggattttagagaacaacacttattgtaggtgaaataattggaacaatggaattgctaggcctaatccttatcttcttagtttaagtgtgacaccctctacctcaatatacatatgtatataatatggtaagcacataacacactggtcgaaaggttcgacttgttatgataccactaaatgtgacaccctctaccccgatatacgtattcatataatataatacgtgagaatatggaattaca

SEQ ID NO: 36607 - DNA, 272 bp, Glycine max
  unsure at all n locations
tcttgagggaactcctcttctattgcagccacctcctcctcggacaccattccagcactggtgaaacactggctaatacggccgggccataccctatccacccgaaatcttgacgacacgttcctcctccccggcatcccgggttcataccctaatccatacttgtatggatttcccttgatatcgaccatgtcggcattcccgaggcagtccttgcctagacccattccgggctcanatccgttcctgagcataacacgcgccaccattat

SEQ ID NO: 36608 - DNA, 392 bp, Glycine max
  unsure at all n locations
agaggcnnnnnttgagcttgataatcctaagttatcnnnatngnagancnnggnnnnnnngnnntttttntttnnnttnnnnnnnnggggnnnnnnnggggggnnnnannnnnnngncnnnnnnnnnnnnnnnnnnnnnnnnggnnggnnnngnnnnnnnnnnngnnnnggggnggggnggnnggnnggggggggggggggggnggnggngggnnnggggngngggggggggggggggggggggggggggggggggggggnggggggggggggnggggggggggggggggggggnnggggggnggnggggggggggggggnggggggggggggggggggnggggggggggnggggngnggggggggggggggggggggggggnggggggggg

SEQ ID NO: 36609 - DNA, 455 bp, Glycine max
  unsure at all n locations
tctgaggaggtgtctcaggactgcgcggcttatcgctgtagttgtgctttccaaggttgtgctttcggcatggttgatgtttgagaggagggaggatgagcttgagggtgtgtcttctatggattgtggtggttgtgttcttgaatgtccgaaggtgaatttggtgaagggctctagtccttgttcaatcaatgataggtgccagtgtccacaagggactaaagaggaaactagcaatgaagaaagtgtgtttttgtgtttgccagatgaggaacaaaaggatgtttctttctgcattgcgagtgaggaaattgattgtgttaagtggagaattgctgccctttctgacccttttaaggcaatgctttatggtggctntgctgactccaagatgaggaagattgatntcagcanaaatggtataagctcacagggtatgacggcagtggagttgt

SEQ ID NO: 36610 - DNA, 406 bp, Glycine max
  unsure at all n locations
atctngagttttaattgctttgntcttcccataagcagtagtcagtagtgcactctcacccatctccattacaagcctttcttcttcctgaacacacatggtcattaattcattgatagaccatttatctntatgtgtgttgtaggaaatcttaaatggcccatattcatgcggaagggtgttcaaaatgaaatgcactangaaggactcagacatatcaacctctagtttcttaagttgagctgaaatatctcgcattttcatgatgtactcacgcacacctttcacactggtgagccgaagagaagaaaacttcatgatcaaggtgcttgctaaagtcttatctgaagtgatgaactggtcatcaatggccttaagcaagtctcggaccttttcatgctggtca

SEQ ID NO: 36611 - DNA, 590 bp, Glycine max
  unsure at all n locations
naagggaaggtacgcgangttttaccatcgatgcncatcngnnncactcgacnccccctcngnncatnnnccccnncncnngntgatgccnnatngnagcccgacnctgnanngcattgcanaggctttgattgttttatggtnctttcacccgtatgaananggatncggaggggggggtcttnaaaaaagagggaagaattaantcattcctgctttggacgaattganaaaacttggggccacattgaaagatgggtgaaggattgaagggaaaaccccgtgctgtgacttgcattcctatacgaccaagtttccaccaacccacaatgtcattactcagccaataacgacccttctcattacctaccacccagacatccacaaaggccatccctaaaatcaaccacaaagcctacctaccgcacttncaatgacaaacaccacctttagcataaaccaaaacaccaaccaagaaatgaatnttgcagtgaanaagcctatagaattcaccccaattccagtgtcctatgctaancttgctccatatctacttgataattcaatggtagccataaccccagccacgg

SEQ ID NO: 36612 - DNA, 398 bp, Glycine max
  unsure at all n locations
ctcagctggacaaggaaggaaatttntctaccatctactatgttactatgtttaaatgagcacagatgattatgctaccacaganaaagaaatgttggcaattgtctatgcacttgaaaagtttaaatcttatttggtaggctcaagagttatcatctacactgatcatgcagctattaaatacttgctcaacaaggctaattccaaaccaagattgataagatggatnnttttgttgcaagaatttgatttggtgattcgcgataaaaagggatcagagaatgttgtagctgatcatctgtcaagattagtgaatgaggaagttacagcanaagaagttgaagtgagagatcaattccctgatgaatcacntattttaataagtgaaagaccctggt

SEQ ID NO: 36613 - DNA, 691 bp, Glycine max
  unsure at all n locations
agggacaaccnnnnnnnaggggnncccnactgatttaaaattggacctntnatnnannanctnngcgnagnancnagcgannnnnnnanannnngncnagnangcatgtcnancannnnangttttataattctncnccatcacaangaaacnacnaaggggggttgataagagacgaanagnggcacacacaacacacncccaacanaacacnaaaacacannnncaaacccacacaccacacggaagcacaaacaaangacacgagccacacgacacgacgacaacgaaagcacaaccagaccgcngaagccagaaagacaacacaaagnggcnccaanacaaagcacaagcacaaagcagcccacccagacanngcaacacnaaaacncacaaacgangccanagacgcacacancaaaaacgcaaccgagaacngcagcgccacaacacagngagcaggagngcgaggacaaacaacacacgcacccgacaaaccccanagaaagagaacatcaccaagcgcacaccagcaacacagaacagcgacagccgacaaaacaacgacgccacacgacgcacaancggacacccaaaacggatacgacccgacaacaancacacacgcgaagcgcacaaacaacaggacnagcgccaacngaagaacaaaanangagccgcnananacacc

SEQ ID NO: 36614 - DNA, 498 bp, Glycine max
  unsure at all n locations
ccctccaatgaactgacgcaatgcgaacncatagacactacatctatgatcaagcaccatgactgggacatatcgagtgagaagnnatattatgttttaacattatcgagagcttccattgctaaccgtgtatcgggctctattattatgaccctggaacgaaccattatgtcttatattatcatcatatgattaaacaaagatcaatcatggtacatgactaagcggctctatatgatatgcactatacacggacctcggtgcgagaagggatgacattttgcattgaatatcagcacaatgagtacaaatgtatgcgtgcgacatattagtccgcactttggacttccgtggaagccagtggggagaataatatggattagatctagaactgacatatgtcaagcagctagtttatgtgaacataaactgccatccagggggagatatggacataaatgatgatcactagaaagatattgaagtgctctgattaag

SEQ ID NO: 36615 - DNA, 370 bp, Glycine max
  unsure at all n locations
agctnggatctcatntctcatnccttatcaacnncncanngctatgagtcagtgtagttaggggtagtgccaatttagaaaatccctcattgaatttgctataatagccagccaaccccaagaaactttgaacttctgttggagttgtcggttgttgccactccttaaccgactccactttaattggatccacagcaaccccatctttagaaatcacgtgccctaagaactgcactttctctaaccaaaattcacatttcgacaatttggcgaacaatttcctatccctcangatatgcaacacatttctcaagtgcttgtcatgctcctncttattccttgaatacactatgatatcatcaatgaacac

SEQ ID NO: 36616 - DNA, 388 bp, Glycine max
  unsure at all n locations
catccaataccctgatgaggatgtcccatatgttcttattattattattggtccattngcttccaaagtgtcatggccttgcangtgaagacccgcacaaacatctaanagaattccatattgtctgctccaccatganaccaccagatgtccaggaggatcacatatttctgaaggcctttccttattctttagagggagtggcaaaagactggctatattaccttgctccaaggtccatcacgagcttggatgacctcaagagagtattattagaaaaaattttccctacttccaggaccacagccatcagaaaggatatttcatgcattatgcaactaagtggagagagcctatatgaatactgngagaatatttaaaaactatg

SEQ ID NO: 36617 - DNA, 348 bp, Glycine max
  unsure at all n locations
agcttggatttgatgcttcaatgganganaagaaagagggagagaaagagagatgggggagncacgaaattgaagggatanaagaggtatagaagtggaactttgaagtatgtctcacaagactctctttcatcanagttacaacaagtgttacacatgcttctatttatagactaggtagcttccttgagaagctntcttgagaaagcttctttgagaaaacttccttgagaagctagagcttagctacacacacccctctcataactaagctcacctccttgagaagcttccttaagaagattcctaaagaagctagagcttagctacacatacctctctaatagc

SEQ ID NO: 36618 - DNA, 393 bp, Glycine max
  unsure at all n locations
gctggctattataganagttcattgaagggattttctatattggcattgcccctaactaagtggactcgtaagaatgagaagttcttctggaatgagaagtgtgatcaaagtttccaagagttgaagaggcggttgacgacagctccagtgttaattttgcccgaccctaagagaacattcgaagtgtattgcgatgcaagcgggcaaggcttggggtgtgtgttgatgcaagagggaagagtagtggcttatgcttcgcgtcaattacgtcctcatgaatntaactatccgactcatgacttggaactagcagcggtggtctttgccttaaagatttggaggcattatttgtacggtacttcgtttgaagtttcagtgatcacaagagtctc

SEQ ID NO: 36619 - DNA, 269 bp, Glycine max
aaagcaagatgactgattcgctgaaccactgcaaaccaagagtggcttgtttttttccgaggcatggttgcttgattgttgtattatacctgtgcggtacattataatatttgtactaaataaattcagacttgatgtatcgactcgtaatatcacgtcgcggcgacctggaaaagagtaattttataagctttataaaacggactatgcgtttttgatcttttacatgattctaggatagtaacatgctcagtgcaaatgttagcgtt

SEQ ID NO: 36620 - DNA, 312 bp, Glycine max
  unsure at all n locations
ccaagttgccatctcctacaatctatattctgttatacagcttctagagagtgaaaactatacatgtacctttttcttcattaccatggactctatgatttctcattagaatatattcttcaacaccctaattaaagcttgtgtacctgaagaaattatagagattanggaaaagttagaacaaaggactgaataatttaatattaattgaaagtgcttggctagccatttcaattagaggtgtttataacaaagcctatatttcactggcttatgcaacttatatggcttcactttgctttatgatatatg

SEQ ID NO: 36621 - DNA, 261 bp, Glycine max
gaacaccgccggatcgaacacgagctgcatttttttccaaggactggaggcaggggacagcaactcctcccttaaatatgatgctttcctcataattattcacccctaattcctatgctgaaacactccctatcaactgtagcctaaacagctaaatctactctagtccctctctatacctatcagcaaaatacctatttttcaaatagcttctacccagccaatactagtgaaccagcctttctttgccagttgattttc

SEQ ID NO: 36622 - DNA, 426 bp, Glycine max
  unsure at all n locations
ttctacttatgtggcgggcgggcttccttcacttttttgtatttacgcgagctttgaccactgttcttccttcccgcgatgcttcttttcatgtccgcctgagtgggcttatagcctaaaccatacttcccacgatttccttgggtttttatcaggctagttatgccgccgttgtctttgcctaaacccatcccgggttcataaccgttccccaacataactcgggccatcattaccgctgcatcggacagacaaggttgcccaaagagggagtccacggaggaaatgttgaccacctcaaaagactgganagcggtttctaacgattcttctgcggcttccacataaagcatggaggatgggcagcttaccaagatatcttcctcacctgacacgatgacctagtgcccctccactatgaatttc

SEQ ID NO: 36623 - DNA, 285 bp, Glycine max
gaaaaccgccgggatcgaatgacgcgctcttttactcatttccaatacggcttgaacaattcttcaactatcactaaactaatgcctctcaggggactggcagtagcttaatccactggaaaagcccttgtaaagacaaggggacgcaataagactcacctgatatcagagtaggaaaaaattgaaagggaaaaaccgtcttataatgaggaactgcgtctattgggattgtacggtgacaccctgaatatgactctgaatatgactacaataggcctaaatatg

SEQ ID NO: 36624 - DNA, 304 bp, Glycine max
caccaatggtggatgaacataaagatttagctttgtgttggagacgcacagagagctgtctgatatttctgctctgagtgaagagagacactacagctttctggttttacatagaggcgcctctctttttctattattttatttaagctatgccacatgtccctcattgagtggagcacactgggcccactttctcttttgattgtgactcatactcagccccaagcagtgacaaaaacctgaccttcgaaacgcttaaatcctgactccgcttgctagccatttctctggatctccgtccttt

SEQ ID NO: 36625 - DNA, 385 bp, Glycine max
  unsure at all n locations
tgttttgatttttatacttgtccttcatttaactgtctttgggcttggcggccacactcaacaaagtactttcgacacctactgtacgttgatttgaccaatgctgttatgggaatgttgcaacaatccttcaaaaccttattgatacattttgagaggttggttgtcatgtggccatatcgacgtccttctctatcataagccatcgtccatttttcctttgaaatgcgatcaatccatgttgctgtggctggacttagttgacgaaatttttctaaattttggtaaaaaaatgtgcttgcaaggagtgtatgctgcataaaatgagttatgaataacaattttaagtatatattaaataaacgtgaccatcanatatgaaatc

SEQ ID NO: 36626 - DNA, 426 bp, Glycine max
  unsure at all n locations
agtcgntgcaacatgatcatacattcatggattgngatttattatcacactcaatcggccagagcatagtgtttttgganaatgtcgctgatgttcggaatgatttgaacgagagattctctcaaggagaccttatcagaatttctgaacttcaacaagagatatatggcctcaggcaaggttccttctctgtcactgaattttattctgagttaaaaatactttgggaagaactttaaacatatatgcgtattccatgttgttcctgtaccattaaatgcacctgtgctgcaatgagaaatgccagacattntcatactcttaattatgctataagaattttgactggttngaatgacaatttttcagtagtgaaatctcagatcctnactatggatccactgcctagtatgaacacaatttttc

SEQ ID NO: 36627 - DNA, 394 bp, Glycine max
  unsure at all n locations
tttatttatccaagctcatctnggnggngaaactccttcttccatggcttattccttaatggatggcgcctcctctcacctctnttcctttgtcttccgctgcatctccatggtggaaaatcatcattaaaggatctcattgaagctcacagatccagcctccatagaagccccacaagcaagcttccatcaacttctatccatttctctctattaatatttgttggaagatattggaatctgatttcatcatcttcagtctaacaattcatatactctaatccgtctatctctgcaatctaattgcaacaagtctctgttgcaaatgtaatgggtctcttgctggtttgtgttgatatcatttgccacattaccacgtacttcatgtgatatg

SEQ ID NO: 36628 - DNA, 443 bp, Glycine max
  unsure at all n locations
gcttcttatccaaggctcatcttggtggagaagctntttcttctttggnttattccttaaaggatggcgcctcctctcacctcttttcctttgtcttccgctgcatctccatggtggaaaatcaccattaaaggaccccattgaagctcanagatccagcctccatagaagccccacaagcaagcttccatcaagtggtaatcagagcacaagagcttcaagtaggtgctccttaaacctccattaattttttgctttaccttctcttccattggtgnttcttcattntttctccatgtatctcctcacatgtcttgtgctanatgttnttaacatgattctttagagtttccaccgattaaacttgctatagaagctagatntgattttctatggttcaaatttcttgttcttgttcttgaaccatgaattatgttgagttt

SEQ ID NO: 36629 - DNA, 392 bp, Glycine max
  unsure at all n locations
atcttggattggatgcttcaatggaggaaaagaaagaaggacagatagagagaggggggagcacganattgaaggaagaaaaagggagagaagttgaactttgagttgtgtctcacaaaactctcattcatcaaagttacaacaagtgttacacatgcttctatttatagagtaggtagcttccttgagaagctctcttaagaaaacttccttgagaagcttctttgagaaaacttccttgagaagctntcttaagataacttccttgagaagcttctttgagataacttccttgagaagctatagcttagctacacacacccctctaataactaagctcacctccttgagaagattcctaaataagttagagcttagctacacacaccctt

SEQ ID NO: 36630 - DNA, 246 bp, Glycine max
agtcgtaagaatcaaagagacgttcgatctggagtcgacatccgtgtgaggactcatgagaagactcgtgatattcgagagcatcaagaccagcatgaagacaagtataagccgatttgctgcagaactgatcgaatagcagaatttgtccagctgaattgctgagggaggagccttttatgcgagtctttactctctgagaatcaattaccatgacgcagcattcgattaccagaagcccaaaac

SEQ ID NO: 36631 - DNA, 411 bp, Glycine max
  unsure at all n locations
agctttactttgaggcaatgaggggcatcgtgcaagagcctcaagtgaacataagggcagatcanaagtcctcacccgtcgatgtttttaacaaaaaaaggggggacaaacnctgnaatttcanatagattgattanacgtcanacggctccattgctgtcactccanaatggtcaagtgactaaatcaaacagaacatacactctgagggagttctcggagagatttgcaaaagataggataaggttgcatgaattatcacctttttcanaaggacagtcaatctgtgttttccaaaaagattaaatcanaatcaaaatcacaaaatagggaaagaatgtcatgaacattgtacaactntccattgcattgcattgtttcatatgaggtcagcgttaccaagtttcacaa

SEQ ID NO: 36632 - DNA, 432 bp, Glycine max
  unsure at all n locations
tgagctcattgttgctaccccacanagctctcatgaaattgtttggccacgctcttccttgcgagccctcttggtttcttgttcaagggctcttgcggtagctgcattttcttctcgtaacccagcacactctttccggacgtctgtagcgaccaacttgaatttttctttggcaagtctcgcttttcctagtttgatttttagagctcggacttcttcatcctctttcggagcatcgaagttctcttcgttgataatctttaacttggagagccaatctaaccctcgtgtatgaactttcagccattcatgataaccaccaatgatgccattacgaatgccccttagttctttaactttccttaacgagctntcccacgccttatggactctatgtataatcttgaaactttgcgcgccgaaatctctcac

SEQ ID NO: 36633 - DNA, 263 bp, Glycine max
cactgaccgggaccttaagcgactgcattttgctttatttgaagtgactcctctaaaattcactttacaaagacactgtcttttaattttgacaagaatgttcataaaatcactcctatgtggaggatcactaattcacacataatcacttagttatatggtgtcttgttactatactactatcgacttctttatatatttctttcaactaagaattaaaaaaaacctgctttcctcaaagctggctttgcattaaaggaaaa

SEQ ID NO: 36634 - DNA, 443 bp, Glycine max
  unsure at all n locations
cttaactacgtattcttttaagaccccanatgtagcttanattatttaattaaggcattattgagtgccatagtttgaaacttctaactttaattaatcgagacattgttaaggttacttagaaaaaanattaagtgtttcaatcaagcagtattcagttaagattggatcgatctgatatagaaaggaaaggttaggaatntgtctaagtatttgtggaaatttttgaagaaaaattcgattacgaaaacgaagattatgtccaatgtagccatttttcctcgattgcaaaatggtattatacctcattattacctctctaatgcaatnnttntatattcttgtcaattgtcttcacattttaatttactcgctttctttttatatntccaacacatttattcttttcttttcgacttatattccatggcactttaaattac

SEQ ID NO: 36635 - DNA, 429 bp, Glycine max
  unsure at all n locations
agcttaaatttgcggttgtatgacttanagtactaacagagcattttagaggggtnntacttntnnntgtttgaaaaacttacataattagcataaatatttttgaaacaatttttaattaaaaaaaccgtctttcataaaacacacaaacagtaggcactaaaaccttcccaaatgctaagacaacaaaggctacattacaaacaaggtccagtctagagcaacacattcacttgaagcaagttccaaagtacctcattagaacagaagcagcgataaacatgaccggattggtgtaggttctccgcatattgtttgtataaagaattcctctcagactgcctataatgaccataatcccctccaacaccangccctaacanattcatcacaacccacaaaaatacacacttaaccataaacaaaaat

SEQ ID NO: 36636 - DNA, 424 bp, Glycine max
  unsure at all n locations
agcagngatgtcaatgtttctcncagttgnggctgggaactcatcaaacagtgtgaaggaagagaatatggaagacatagagaaacatcagattgagatggatgagggagaattcagtgatggaatcccttataagcctagtttgatggatcatcagagtactaataaccaacaatctgaggacttctttgctgagttgggagaaatagaagctgaccctntggaccttttgttcacacaaggttttggtggtgctgatgatcaaagggaatccaaggccttggatccatttcatctctttgactggtcaggatacaacaacaacaacaacaacacaagtagttcatttgaagaacctaacaataagagaaggttataacaagaccctagaaaaaaatgcatgcatcagcaccttcctcacaaa

SEQ ID NO: 36637 - DNA, 466 bp, Glycine max
  unsure at all n locations
attaagagagtgagatagattgttattaanaattagtatctgtattatttaatggaaatgattcattgataataaaagcgttggattctgcatgaccaacacantttttntcccagaaatttaaggtatttctcagttgagattcaagaactacactatcaagatattgagattatgtaagaagtttatctctcagtttatagatgtttttttcatacacatacaanaaaagaaacatcanagttaaaattnttaataccaatccttatgggattntatctaattcaaaanaacctatgagaatcttgtcacaaatattttttacaatnntaatttaccaatatatntttaaatatattatatattaatctattaattgtattttaatgaaatagtctgattcaatcgacaaaccttttcaagttcagttcaattgaaccaacgggtcttcagttcagtttcattc

SEQ ID NO: 36638 - DNA, 304 bp, Glycine max
gatgggtgtgtgtactaagctctacttttcaacggaagtttcgcaaagaacttctcaagaaagtttctcatgaaacctatcaagaagctatctagtctataatagaacatgcataacacttgttgaactttgtgaatgaaagcttatgagatcacttaaagttcccttctctcctctttattccttcatttgtgctccctctctctcttcttgcctccattaagctcctcttaagctttttccatggaatttggtgggaactcttttcttgctattcctatgatggtcctcccttccttttctt

SEQ ID NO: 36639 - DNA, 389 bp, Glycine max
  unsure at all n locations
ctcaagcttatcatgtgagtgtcgtaggacatctcccaatcaataaattttctttaactacatcaaatagtgcacttaatgcatgtgaaattataaaactacccctaatacaaaactaccccaaaaataatgaaaccctaatctaatatgtacaaagataagtgggctcatacttagcccatgggccaaaattctaccctaaggccttcttcagcagctctagcccaatattcttggagtcttctatccaatacccttggagggtaggattacatcatatgtggatattattcttgatagtttaatttgccaatgatggacaaagtcttccaaaggggactcaantttgcctgatagattgaatcanatagattcaaatgtcatgatag

SEQ ID NO: 36640 - DNA, 343 bp, Glycine max
  unsure at all n locations
agcttaaactttcatttctagcgtttcgnnatataacggggactcaatcatacatccgagtaaaaagttatcgtcgtatgaattggcttaaagcttaaacattcaaatttgagcgtctcgttatattacaggactcaatcagacatccgagtaaaaagttattgttctttgaattggctcagaggttcaacattcaattttgagcgtctcgatatattacgggactcaatcagacatccgagtaaaaagttattgtcgtttgaattggctcagagcttcaacattcaatttcgagcgtctcaatatattacgggactcaatcagacatccgagtaaaaagtta

SEQ ID NO: 36641 - DNA, 436 bp, Glycine max
  unsure at all n locations
agatactcagcttgagccattctaanataataacttntactcggatgtctttattgattcccgtaatatatcgacacgctcgaaattgaatgttgaagctctgagccaattcanacaacaataactttttactcggatgtccgattcagtgacgtaatatatcgggacgctcaaaattgaatgttgaacctctgagccaattcaaacgacaataactntttactcggatgtctgattgagtcccgtaatatatcgagacgctcgaaattgaatgtggaacctctgagccaattcaaacggcaataactttttactcggatgtctgattgagtcccgtaatatatcgagacgctcaaagttgaatgttgaagctctaagccaattcatacgacaataactttttactcggatgtctgattgagtcccgaatataacg

SEQ ID NO: 36642 - DNA, 346 bp, Glycine max
  unsure at all n locations
agctntgtgttcttacccgaagatcatctgtcatcctctgttgaaatactctgtatgcgagaatgtcctttgctggaagcaagatatcaaattcagaatgggagatattggtctaggattgctcacattccagctatccagataaatgaaaaagtgataatatgagttgttgcatgaataagagtcatctaaagataaataaataaaggcttaaattattttgaaaaagtatgatgttaatgttataacatttttatttttatttcttgcactcccaagagaacaaatttgcgtttcaaacttcaagttgactacataaatagttgtccatggatggtacatctgt

SEQ ID NO: 36643 - DNA, 428 bp, Glycine max
  unsure at all n locations
tatntanatgcattagttgtgttgagatccttccttatttgttgatgttctaaaaaattttaaaactttntaaaaaagtataaaattttttagaatatcttgaagctggtgaaaaaatgtgaaaacctaaatattcttgagatgtgtggaaccttctagaactttatgaaagcgtatggaaggatatcaaagggagtagaagagtgtggaaactcctagaatgtgtgaaacattctagagagttaattttcaccctaaaatacaagtaatctccaccattcattatggaggtggagtaatataaacacgagtagagttagagagcctttttgagagagaagatagataacttgaaaaatctctatcttcaagcttgagtgaaccattatagagtccgtcaatcttgtaaatatatcctttgaattcta

SEQ ID NO: 36644 - DNA, 371 bp, Glycine max
ctctctctctctctctcggtctctcacacacacgttgacaacattgtagaagatctttatattgtaatcgaattatacattatgatatatagtgaagagataaaattttgtaataaattattgtaaaattatattaatattagtttttgatcaattaaaagggtgaaaacttttacactgacaattatatttatttaactcaaacaaatatttttaagctgaaaaatagattactattacattcatttaagtggtacaaaatattaaataatgacaatactattttcttgtaaagcgggtaaaaaagtcaatgtcacttatccttatcaatgagtctcaatcaaacataccacatacattaatttaatatc

SEQ ID NO: 36645 - DNA, 414 bp, Glycine max
  unsure at all n locations
actgaggaagaagacaatcattgcgagcccattctntattcccacttcaccttcattccctatcctttcaccttttacacccttttgtatatttgatcccttcatgactatggagggctaaacaatccactgttggggagcttcccaccaaactctcttgatgtaaaaactcttactatctatataatattactactagtttcattgctcttcctgtgttgatttccatgtatagatgtacttggtttgatcatccatttatattttatgtcanggtttaagcattgaggaatgtggttaatccttagaactangaagagcatctaacatgcgtcattgctaaggatagtgtgaagtagtttagtcgaggtgtacatctntattagtcatgtagtttgcttagttgagttcttg

SEQ ID NO: 36646 - DNA, 539 bp, Glycine max
  unsure at all n locations
nnnaacagcnnnnnnnnnnnnnccccnccccaattaattaattttgcctaaaannctngnnannncnnnncnatnngcnnagnancncnngagngggngtgnnggcgngcnttcttgngngtgcgcngttctcggncnncngngacngagcgtgnntttgtntttccccatgcgcctntgcggcctnnntgccnngttnngtgggtgtccctcgcttcgtgcttttgcctcgcttgtcgngaccccnnctgctngaatctctcttcttttggcctgattctgcngttgttctcagttgttctcgntaatgggagtatctgtcgagaaaaatcaaactgaacatgaaaatatgtacgaatcctaccaaaagaaccataaattgacgaaaagatgctaatttcatattaccattcaatacagaagntagtcgtgaatgaccactaacaatcatgtgatgatgatatctttccagacttgtctactaagtcataaatttaacatacaagtcaataatatcaatattgtaaataagtgagcag

SEQ ID NO: 36647 - DNA, 298 bp, Glycine max
aacttagatgtatgctcgcagttctcgataatttgaaataagctaacacttgagggagagattgttagttattataatgggccactaaacacgcctattttataggactgacagggtttggttagatgcttactttacgcctatattgctaccatgcagtatatgggtctctcgatttattgatgttctatcctgacactcacgtgtgtgaagcttataacagccattttcttatgattgactatatgcgcaatcttcttaccctattaccgtgtgatacgcgcgtatccattaatct

SEQ ID NO: 36648 - DNA, 197 bp, Glycine max
gataggtacatccaaactcgggaactctataatctcaagccccgcgatatactcccaaacactaaattatatccatgagggtgcaaaaaaaagatcgggctccgatgatatccctacagcccagcagagagctaggctccaactgagcgatcagcatttcaaggagaagactgcgccagaagcgtgcatataaagaa

SEQ ID NO: 36649 - DNA, 273 bp, Glycine max
  unsure at all n locations
acatctatcctgtgtttcagatattngaacgggctatccgcaacaaataaatacgtaacaagtcaattcaagaaattgggagaagagatcctgtctcaatttaactagttcatgtcaatttgattgctaaccttcattgaagttaacttgttcaatgcttccagctacaccataaccctggattacattcacatcttttacaaactgaggtgagagctttggaagcaaatttctggagtctacaatcacagccttgaacatgcgtgatggggc

SEQ ID NO: 36650 - DNA, 403 bp, Glycine max
  unsure at all n locations
agtcttgtttattatgtgttgtcccatcacatgtggtactaggtggcggtcgggcgatggtgcacaacaagttntccacatccacaaatcgcgcataaacccaccatcccctgttgcccacctccaactgagctcacgtactcccacgtagcccatatcctcgtttctctcaacaccgggtccccatcaatcctcccaagcttccccaacatccaagtaatacaacattcaaacagcacaaactatcacagccaagataacagggcatatgcagaaaactctgcccaaaacaccaaccaaaatcacagctgttctcacttaaagaccccagtaacaattccttcgttccagttcgttaaccgttggatcgactcgacaattntactgcaagtctctatacata

SEQ ID NO: 36651 - DNA, 418 bp, Glycine max
  unsure at all n locations
ccttagatactcagcttatagcgcgtctgggaacgaagtcaatgtgtccttatattatgatgatgttccgagtacattggatttggtacgaccatgccctcctgatttccacctggggaattggcgagtggaggaacgccccggcatttacgcaacgagcataatgtaaacctttatggttntaaaagctctatagttgggcctaggctntagagtttttccttttgttaaagctntgtgtcttttgtttttgaatttataatacaaggatctttcttcatctattcctacgtctctacccattctcattcatttgcatgtntacttctttatttctgaaacggcagatccgatgacgagtcccccgaaggtactaatacctgngacccgcttatcaacttcgagcaagaaatgaatc

SEQ ID NO: 36652 - DNA, 333 bp, Glycine max
gcctacagttaatgtcaatccagccactgggagaggatcaacccctcataaagagaagtatcatagttatctgggagttgtagcacgagagataattcctattgtccactccaattggaatgttgtaccagaaactttaaagaatcttatatgggatgacatttttgtaagtccttatttaagttgacatttgtatatgatgtcatataataattgcaaaaatattatatttgactaattgttactgaacaattttgttttggagggcaaatttgacatccccgatggtggcaatgctgaaaagaaggtgatgtcaatggtcgctactccatg

SEQ ID NO: 36653 - DNA, 442 bp, Glycine max
  unsure at all n locations
tgagattgttgacgattatnccttnctcattataagggatattttatatnactnggntgatatggaccaaccttgagataaacacgtcgtatttcatctctntgatcaaaaggaaactcccacatcattgaacgcaatccacgatcttgctctatattaataacatccatatcttctacttcaattcttctacattntanaggttgtacttcatcanattaatttagaatcttgtgtgaaatttgaagcttgtggaataggaataagctgagatgaatcaataatattattgttgctttcttctttaagaatgacaaaagagttttttgagttgacatcttcaacaatacagctgtagtatttctcttttacaaaccaataaacatacaaaatagaattaaaataataatatattaagttaagataaaatgtaattgaagta

SEQ ID NO: 36654 - DNA, 160 bp, Glycine max
  unsure at all n locations
gggacttcaccacctcctganccggnngnnntttnttnnnggtggttnnnnnnnnngnntnttttttttttttttttttttttttttttttttttttttttttttttttttgtttttttttttttttttttttttttttttttttttttttttttttttg

SEQ ID NO: 36655 - DNA, 441 bp, Glycine max
  unsure at all n locations
ntgagaagtntgtaccactgattccttctagttntgtatcagtttatatgaagtagtaagatgtttcaacgaatttaataattagacctcggattcttcaatcattttttttttttttttggctatgacatgtaacatacgaaattctttttgcttctcttcttttgttccactgtaagcaaataactcatgtttatgtattctatagtcacttgaattggtccataattcacatatccgattttcatgttgaagaagcgcaagattccgtgcaaacaattcttagatgctttcaagctcaatataattgtcattcgtttcttactattttaatataaacatcccttaggctagttagaagcctagaatgaagtggcttgtagctatgcgattttcacaagtatgataatattttcagaagctatgatgagttggtgatat

SEQ ID NO: 36656 - DNA, 379 bp, Glycine max
  unsure at all n locations
ttctntaaatgtgatgtaagttttgatctcctactcacaagcaaaagagacatagaggaaggaagaacaataaaagaaagacataaggaatagagggaggctcttgcacgtttatatccacccctcttttattaaatagttttgttgtttacacccagttcctctaaacacctccccttctatatccaaagtttacaaataaggtccaacactttcacaacctacactttaagccctacaactttatgaaaactatcaacaatactatggcaattaataaaaacataacgatttttaattaataattttcatatcaaatagcataatttaaatttagttctctcttgcggtgtttatcaagcacttagcacacattatg

SEQ ID NO: 36657 - DNA, 451 bp, Glycine max
  unsure at all n locations
tgaagatgttgtgctcanagtctctggatgatacncttcntttagactttggagtaaaccttggttctaagatgtggcaacataagtgttatcaatctaacaaaaaatcctatcatgcattctacgactaaacacatagaaataatgcatcattttcttagagatcatgtgttaaaaggtgactgctacattgagttcatagatagtgagcattaacttgcagacattttcactanaccacttgctagagataggttctttntcattacaaatgatataggcatattagatgcatccaacataaaataacttcctatttgcataatgtgtgatgcacatngctatttgagacgatgactaatttattctggagtctctactttaatcaatcaccaagtagtttaatcgattacttctctctcgctaaagtgtcagaagtaacaagacactt

SEQ ID NO: 36658 - DNA, 358 bp, Glycine max
  unsure at all n locations
agcttctactacatcagccagggcanaggcactntccaaacctgaatctacagaagatagaacctanataagaagccaagcanggccttttggtagaaaaaaggtatgtaagggttctgggtctattataacananaagggggagaacggattttgtgatgtgtctatcccacaacctggtgaaatgtaagaccacctacataacctagcccaaaagagtgtaagcgagggattaaaaacctagttgatcacttataaagtcaagtagaaaatattattctattttgattcccaacatgcaaaagtacaaaaccaattaacatagaaattagagtgagttggatggaacctgatgatc

SEQ ID NO: 36659 - DNA, 273 bp, Glycine max
  unsure at all n locations
tgacatgatctctaataatcagccctttgtcatctcgaagttggttgataatgcaaactntctcacttggtcctggctgaaagggtgagaaaaggattttaatgttcctttccaccaatggttctcaactatgtctatggccgttacctagtgtgtggtatgtagggttgggctttgcggctatcatatttaagataatttctaattgattaatattacatataaattgaattattttacaatgaatactttctggcacactttcttacaata

SEQ ID NO: 36660 - DNA, 495 bp, Glycine max
  unsure at all n locations
accccgcccgcaaagattcacgcccgaaattntgatncccnantnncccgcgccagcgtggctgatgcaccgaaaacaccgaccgggacccgagancaccgcagcagcaacaaggagtcnactttatttagccaaaccggaacaggaggagggggcgcacgccaccaagaaaatagcgcgaaggaccgcacaaggcgccaataatccgcaagggacgcatacccgtgacagccatataaacacagaagacaacggcataactaaacgaccaggcaacaaaaggggacccaatcgggaagccaaattccacaccaaacaaggaaataaggcgcccccaccggatgggaggacaaacaaggcgccaaaccaaggagccagacaaggacccacacggaaaggagaaacacccaacgcacggcccgagaaaagcataaagccaggcacaaacgcaaaacatcaagggcaacggaacgacgacatacgacacaagtgcct

SEQ ID NO: 36661 - DNA, 530 bp, Glycine max
  unsure at all n locations
cccaactccggggggaacatgaacggaacaaaaaacnnccccccccagngggagagtagctgagcactgaaaccaccanccgggacccgaagcgacgcagcgagcaaggagcttctagntttttacaagccgcgccgccggccagactctcaaatgccacactcgccatcaataacaaggaaatgttcactcttacaatcagataaagacaaagatcatgcggaaaaacgaattatgtgatataactcagttttagaaagaataatccagtaaacaatcatgaaaccagatggtgcaaagaacttgcaacaggaacgaatgacataatgatgatcactactatcgtgcataagtcagaacaccaaaatagatataaaaggtttcttagaccacgaaccacgaaagacacacaaattgtagatcgagaacaggtaaagcaacctgcaacacagaggcggaaagcaaaaaaaaactacaagaaatcaagtgcctaacgacctcataagcgagggagagaactactaaatagt

SEQ ID NO: 36662 - DNA, 452 bp, Glycine max
  unsure at all n locations
tgctgcagctaccattgctgctttgcttctccactatctgaggatctttacctggaactgcttcgtgaagctgaaccagaatccataacgtgtaaagttgccaacaatatgctatggttaaggaaagaattccccaactcctgcaacatatntggataaagtatttctaagcgggctgaaatatttttcataaaataaatgggacaaattccatattctatagtgtatacaaacttttctaatcaactaaattggacaaatttcatattctattagtctctatactattagacgtctacacatagaaagatagtcaaaggacaggagaggtgcttccagancagtntttgtaaatggaaattatgataaaaagatgcattcactaatcaattgaatgaccaacattacgggcccctctatatcattaaaaagagataatatggacaaaatta

SEQ ID NO: 36663 - DNA, 181 bp, Glycine max
aaggtgcatatccttagagtgataacatgacattggggctgctacccataatgaaccttctcattcaaataatgactgacacatctttagaggctggtgatactactaatacccgtcaagacataaagagaagcttaggtgcattacactctatagagccaaacattcttggcctacgatc

SEQ ID NO: 36664 - DNA, 279 bp, Glycine max
acctctctaatagctaagctcacctccttgagatgagaagctagagcttagctacacaccccctataatagctaagctcacccccatgacaaaaaagcatgaaaataacaagaaaagttcttattacaaagacaactcagaatgccccgaaatacaaggctaagaccctatactactagaatggccaaaatacaaggcctagacaaaggaaaaacctattctaatatttacaaagataagcgggctcatacttagcccatgggctcgaaatctaaccta

SEQ ID NO: 36665 - DNA, 444 bp, Glycine max
tatcttggtttattggatgtacttctattcgtaatttaatgattattgataatttattacatatctttaattcttttttgtagtgatcgattattattaaactttttgctcaatccactaatagaaactaatttcactggtggttattattaatatgatgaaattttacatcattatttaaaagtactgattcatttctagtttgtttttaagtttaataaaattaattttcctccttcgacaaaataaaattaattctttcgtaactttaatataaattattaaaatgtgtgttaaattatttttataagatctatatgacacattctctatataattcttaccgtttattccatcttttgtaattagaattagaagttcacatgtgataatcacataaccgttaaagtccgacataactgatagtaatatgtaaagaaattt

SEQ ID NO: 36666 - DNA, 483 bp, Glycine max
  unsure at all n locations
tggtatctagatatctagaaccccngcanncnactggacccgggaccttaatcgaccgcagctgcttctnactatgattaagacacaacgaactgggtcgctggattaaaatcgtggcccgtcacatctcgaacatatgaaaatctcaaacgcccttatgtgtgcatgtaaggacactcaacgaaggattgtctgcgtaataagagtgagtgcaagaacttctaagcataaatctgttagaactgtgttgctggcactatgaaatgctgcatacatatctgcgctaggaaacatcaatgtgactctacatgcggaagacaactcatgattattggatacgggattttcatgtgctcatctgccatgacatacattttataatgagaggcactttgacacttcttgaaggttatctgccatgggaatatcctccttgaaatcttgtggttgaccttcaatcacatgtcgacggatttcgtcaat

SEQ ID NO: 36667 - DNA, 327 bp, Glycine max
tttcttcacttatgtttgtatggctagaaacaagcacctaggcagtggtacaagaagtttaatgagtttatgagcaactcaagattcaaaagatgtgacatgggccattgctgctatgttaaaaaatatactaatagttatgttatccttgttgcgtatgtcgatgacatgttgattgcaggatctattatgatagaaattaatatgttgaatcagcagttggcagaaaactttgaaatgaaggatcttgctcccgctaaacaaaatcttggtatgagaattcttacatacagatcataatggaattttgagctgtctgaagagaaa

SEQ ID NO: 36668 - DNA, 497 bp, Glycine max
  unsure at all n locations
atgcttgannctacgggtcatgcatcgcaancanggnanttnagctcagacccgggatcctctagagccgcctgcacgtttcnngctttgtattggcctatcaaagagagagtccatagcggctcattattcaataagacacctcctctgtacgtatctcattgataccgatttattgatgatcgtgacgaccacaacatttcattcactagaatagtaggctagctgtgcagtaggtcaccgcagtgtgattagatgactcgtgtgctctccatacatcttactagggaagaccttggtttaccattctaatctgacagtgggtacagcttgtaaaaacattatttgattgtagatcttacacatgcgggtcttaaccataaccctatacctatatgtctccgtggatcagtgactctttccgttttgtatacaagatatgaaaatactatgataggctttcttggtaagcttttcttttttggcatattgttttt

SEQ ID NO: 36669 - DNA, 372 bp, Glycine max
agcttgaaatcttaattgcttgttcttcccataagcagtggtcaacaatgcactctcacccatctccattacaagcctttcttctttctgaacacacatggtcattaattcattgatagaccatttatctctatgtgtgttgtaagaaatcttaaatggcccatattcatgcggaagggtgttcaaaatgaaatgcactacgaaggactcagacatatcaacctctagtttcttaaattgagctgaaatatcttgcagtttcatgatgtactcacgcacacctttcacactggtgagccgaagagaagaaaacttcatgatcatagtgctggctaaagccttatctgacgtgatgaactgatcatcaatgac

SEQ ID NO: 36670 - DNA, 294 bp, Glycine max
agctctactatatcactctggcaaggcactttccaacctgatctacagaagatagaacctaaataagaagccaagcaggccttttggtagaaaaaaggtatgtacgggttctgggtctattataacaaaaaagggggagaacggattttgggatgtgtctatcccacaacctggtgaaatgtaagaccacctacataacctaaacccaaagagtgtaagcgagggattaaaaacctagttgatcacttataaagtcaagtagaacatattattctattttgattcccaacatgc

SEQ ID NO: 36671 - DNA, 251 bp, Glycine max
  unsure at all n locations
ctcctctaatagaagagcgatatgcacttcttgcattgtacattcgctttatcgtggggaaactgcggcattgtgtttttcacgttaacaagatgttttcggttcaccatcgactttgtcatatcagcaataattntcttttcttccttaatcaatcgccccgcgtatggatgtccaactaaggacttcgcaaattcatgattatgaatcccacagatcaacttcaccatccaaccttctcctccatgcac

SEQ ID NO: 36672 - DNA, 575 bp, Glycine max
  unsure at all n locations
gcactcgactcgtgacgctcatcgtgatctataatacttatcacacacttaacntcncccncnnnnnnaggggnaagagtgagcttgatgactggcaaacaagccagacccgggaccttagatcgactgaggcagcaagcgaaggttgttngtatagtagtaacgagcgaggaagggcaggaagcatcaattattcacagagaggtcgggcctattgaacagctattagtacgtaggaaatagccatttgctagaggagagtctccataanaagacncaataataagaataataaacgcgtacccaacaagctctctcacgcgctgaaaagccatcaatctgtcacgacaaagaacaatataacaacattttgcaatagagaagaccagcggaccgaagagttaagaatactcgcgaaaaaaccaccgcgagaggtcggtaaaaaagtgatacttgctaaaaaaaaatgaggtggaagctcaagcccctcttgctgggaaacacacatatcgtatagaacaataccggaaacaacgacactgaaagagaagccgcgtatcgatatccagtgagan

SEQ ID NO: 36673 - DNA, 449 bp, Glycine max
  unsure at all n locations
agcttcaagattcaatntctagcgtctcgatatgttacgggactcaatcagacatccgagaaaaaagttattgtcatttgaatntgctcagaggttcaacattcaatttcgagcgtctcgatatgttacgggactcaatcagacatccgagtaaaaagttatggtcgtttgtattggctcacagcttcaacattcaatttcgagcgtctcgatatgttacgggactcaatcagacatccgagtaaaaagttatggtcgtttgtattggctcagagctgcaactttcaatttcaagcgtctcgatatgttacgggactcaatcagacatccgagaaaaaattattgtcgtttgattggctcagagcttcacattcaatttcgtgcgtctcgatatgttacgggactcaatcagacatccgagattaaaagtattgtcgtttgaactgctc

SEQ ID NO: 36674 - DNA, 264 bp, Glycine max
  unsure at all n locations
ggggacgtcaggtggggtgctatntcccacaaccaagcttgaccaatcccgacccaactcgggcatagtcagtcagtgagaacctgtgatgtacctaaacaggcaagctcctggcagcaacagataagaggaacaaagaccacacagcaatgaagcttgtgtggtggctggccagctgtgaaacttgattgatatatgggatgtggcctcttgtcatcgattaccacaggtgggtaatcattacaaggctttaaagtgaaacat

SEQ ID NO: 36675 - DNA, 191 bp, Glycine max
ctgagaaaactggccacactcagacttgcacatgtgcatgcttcagataacctgacgttgagagataatacactacttcacagggaagaatttccgcacatgatataacggagtaaagatatcggagagttgttttgctattctacaaggacggcctgctgcttgaaacaggataactctcgttttactat

SEQ ID NO: 36676 - DNA, 358 bp, Glycine max
  unsure at all n locations
agcttcctatatctataacggngcanacaagggcaccaagaagagcaagaagaagaaccctacaagccatcttgtggtagaaaaaccaagtaattaacttggacaagatggctattgatgaagactaagagaaggaaagtagggtttatatatgcaaagggcaaagggtacgtaagggttaaaacaactaagagctactaaattattatgatgtatacgaacatatgctttaaattggatcatcttcttaaccatgcaaacgcgttggggtacataaatgcttccaactgcctctatttgacaaaagagaaatacctcaaccactcatatatctctagggacccactattcggttatc

SEQ ID NO: 36677 - DNA, 358 bp, Glycine max
ttcttcttatccaaagctcatcttggaggagaagctccttcttccatggcttattccctaatggatggtgcctcctctcacctcttctcctttgtcttctgctgcatctccatggtggaaaaccaccattagaggacctcattgaagctcaaagatccatcctccatagaagctccacaagcaagcttccatcatcctcttaatcacccatcgtcatagatttggatatggtgcgataaggatgccttgcggcgcgtctagttatggcatttttcctaaaataccacacgtgaggagtacgtaaaaataatgaatgcatgctagagataaaatgtgggagtgatttgattctcactga

SEQ ID NO: 36678 - DNA, 409 bp, Glycine max
  unsure at all n locations
tgcttgtattattatggngtacccatcacatgtggcactaggtggcggtcgggcgatggtgcacaacaagttnttcacatccacaatgcgcgcataaacccaccatcccctgttgcccacctccaactgagctcacgtactcccacgtagcccatatcctcgtttctctcaacaccgggtccccatcaatcctcccaagcttccacaacatccgagcaaaacaacattcaaacagcacaagctatcacaggcaagcaaaacagagcacaggcagaaaactttgccaaaacaccaaccaaatcacaacttttctcacttaaagaccccagtaacaattccttcgatccaattcgttaacccgtggatcgactccaatatgttactggaagtctatagtacatgaacctac

SEQ ID NO: 36679 - DNA, 352 bp, Glycine max
  unsure at all n locations
ttgcttatntttctagngncgctcaataatcatgttcctatctgtggaattctgcatatctctatgacaagctggtggttgaaagccttgcttgccacttgtgttcatgtgattaaattctttggaacaaacacaattttgaataaccattgtgagcttgtcacttgatgacaagtgaactgttctttctttgcttgaggacaagcaaaactgtgaatatgggggagttgtcagtcgtcatttacgactaacttctgtattgaaaagcagtatgaaattcgtcttttctccaatttatagttctttatgtaagtttgtacatatttttaggtttagtttaattttgctcagt

SEQ ID NO: 36680 - DNA, 244 bp, Glycine max
atcaaagctcactcgtgagtggtatggatgaattggtctagcctttgtaattgcatattttctgtgaatttagtcatgtgattttaaaatgagagtgacctgagttgtgtttatgacgtgtcttaaatggtgtaaggtgaagtaaattgcagtccatttgaacagttagttaaatgagtgagtcaaatgagcgacttgaaatgatattggatttctagtctgtcaaccacactggtcatttact

SEQ ID NO: 36681 - DNA, 344 bp, Glycine max
agctttatttcatgaattaagcagccatagatctgtatcgaaactagtatcccaaccactaaaattctataaaccaatccccccttgaatgtagaacccaaccctgatgttgctagaccaagagtggaaaggaatgtcaaaccttttttccatatgtttaagccatgtctagcagaaaaatatcgcatcatccatcaatttttgaccgttgaagctcttgtttgagaagactatcctgttccaatggtaccatatacactagatcagaaaaaaatcaccaagtttgccatcactatattctgataccattgagatagaatataagtgtcgaatgaagtgttttc

SEQ ID NO: 36682 - DNA, 297 bp, Glycine max
  unsure at all n locations
tcaccccaaccggggtccattaccccccccccccggtgctgacccaacacanaganngaggagaaaaggcgagatnngtatagaaaaaggaaggagaagggaaagcgcaaaaggaaggggaagaaaaaaaaaaaaaacgaaggaaaaaaaaagaaaaggggaaagagaaaaaaagggacagaggaaaagagaaaaagaagaaggagaaccgaaaaaacgcggaaaccgcacgaaaccgaacacaaccaccaaagagagccgacaagagacaaacaaaaaacccccaaaccgaccaac

SEQ ID NO: 36683 - DNA, 589 bp, Glycine max
  unsure at all n locations
aatacccggacgagactgacattgacatgcgagcacgaccacantgcactnacnnnccccccnnnncnnnnnnaagggatgagcatgatgccttcgcannccnacnnannncnagnagannccgagagangacngcangcagcaagcgcagggtgaccnangatgcncannggaagaaaacacaaacggcaccgaggaagaggngcgaagccaccccccccccacannagccnangaaaaggccagaggggccgaggggaagacgnncaacanccacccgcaagaagccgncacnaaaaccagggagaacaaagagaaggagaacaacaancaaggcaacgcacangnggaacgcgccacgacaaaaacggaacagaaaagagaccggcgncancgaacgggagacacaacgggaagagancaaaccgaaggaagaaagcaagcaaagacccaaaggggcaanaccggccangcaggcagcaacaccaggaaccaaccacgagggacgggnacccagccgaaagcaagnccgaccgagcgncgaagcggaacacacacaaccaagggaaaacgaagcgcaaccgacccg

SEQ ID NO: 36684 - DNA, 323 bp, Glycine max
  unsure at all n locations
agctgtcactatatgcttacttgtgtgggagccttcgggcctaatttgaagcctgcttcttatcatgagataagagtgccacttcttaccaaggaattagagaatacagaaattctgttgaaagaccataaagagcaatggggaagattngcatgttcatttatgtctgatgcatggacagacagcaaacagagatgtatcatttacttcttgatgaattgtccgtttcgattattcctattctatacaacaattgatgcatcctattctgtgaaatctggtgaatatatatctgagtcgttggactctattgtggaagagat

SEQ ID NO: 36685 - DNA, 360 bp, Glycine max
  unsure at all n locations
agctataggcttagtccttactgattacacagcacttacgatgaaattcatctacaatgaccaattgattgagttagtgggagatcgcgactcatcttttcagatgatatcaccctcccagttacgcaggttggtggacacaggtaacaccagtaccttcttccacattanaatggaaccttccttggagacgccaatgactataacccacctaataccggcagtccataaactcctttccaaacacgctttcctcttccaacctctttcaactctagccccatctcgagccacagatcacagcattaccctccttcctaactcagccccagtcaatgtaaaaccttaccgttaccttca

SEQ ID NO: 36686 - DNA, 351 bp, Glycine max
agctagcggtttgtactttctacttaacaccatcgggttgctatctcgcgccggggtattgtgggctgcgacactggtgtgcgattgtctaacagcatcggatgcggtcgtcgtggcatcatcctctatagattttggactttagcgtggactccgtgatataagccatttgatcttttaaggccgatagatcggtcttcatctgctcttgcacgccctcttcattattcatttatttggatcgagtgacatacgggtgcctttgtgctctcttagttatggtgaattccctaaagaaacaaacaacgatgagcatgccaccgcaacatgaatatgagaatgaatgatcgg

SEQ ID NO: 36687 - DNA, 339 bp, Glycine max
tagctttgatctgtctggtaagagaagcaattgtgaaaaagctgtacaggggattctcagtgctgtcaaacaaagtgtattatttttgtcagcaaagataatatattatatattgaaataagtaccagaggtacttactatacaaaaagagtccatatagatggttccacagtcagacattaatattctgagggggaaccaagctatggatacagaatgcatatgaatttacatgtatagagctcataactatgcaatcccctgctgatacataaaactgtgtggaaaattacttgaccattgattaaaatgcactgtgaaatccttctcaaacttcta

SEQ ID NO: 36688 - DNA, 338 bp, Glycine max
cagtagaccgggccttgatcgactgcgcagcatctatttgtttggcaggcactttgggaggaattgattgcacctcactctaggtggactcacatttttggggctctagataggagaccatctttgaataaggactgacttggtcactgatgccatggcccatatgattggcacgcgatagggtgctgtttagtgctgatattttgaggatttgctcacttcttctaagaagtgggagacctaatgcggtgttttgtggatgcggtagtctgttattgggagaactgttcttgacgggcatttgaaggtgacagtgtacgttggagactgctcctatt

SEQ ID NO: 36689 - DNA, 157 bp, Glycine max
ttcttccttattatgagcacctaacggactactgggagaaagtatgaccatctgaatctctcgagagcttccattgatcaattttaagcttctaaatatattatgcacctgaatgatacttgagactgaaaagttatgacccttggaatttctcgag

SEQ ID NO: 36690 - DNA, 362 bp, Glycine max
  unsure at all n locations
tgctntgagtcaaaatcctgactcaccatagaccttgacctagggtgagaatgtcaatccttaccctcggaagcaaaaaagataagaaggaaaatttccaatcaaagagaaagcaaaaagaaaagaaggaaaatctccaatcaaagagaaagctaaaagaaaagaaggaaaatttccaatcaaagagaaagcacaaagatcagaaagaaaattctcaatcaaagaatgggagacagtaaaaaaggaagaagaagaacgaaagatagctcctgatcaatgatcgaaagataacagaagaaatgtgcagataggtctntggaccggacaatatctgaacaatatagaagtggtcccaaatgaac

SEQ ID NO: 36691 - DNA, 394 bp, Glycine max
  unsure at all n locations
cggagagctgaatcnganncccnntnnccggnccgggactctagcgacgcagcagctcttgattctaatcgctcccatggcttcggaggtgaaatgccaccttccctggaacanaanaaaagaatgaaatttcctctttaataacgataagaaatttccatcgagagagcaaaaaagaagaagaaatttctatccagaaaaagagaaagatttccatctacatgggaaagaaaagaaattccctcaagatgggaaataattgataaattcaagaaaagctctgtcaagaacatagaatggccaaggtctggacgacatttgacatcagatcgtccattgacaagaataaagaaactactaaatggctgtcttgttccaccaaaatgtgccacan

SEQ ID NO: 36692 - DNA, 441 bp, Glycine max
  unsure at all n locations
agcttatctattgcatcatgctcttgaccgcactgttctgcatcgctcattaatcccacacagattattgacatccgcactgatgtggttattaatgcatgtgagtgaacaatgtgtagatgtgcacatcatagacaaaagcctatcgtgtgcatcatgactctcaactgtattattctacatcactcatcgagaccatgcagattattggcattcgtattaatgtggttgtcaatgcatgtgagtgtacaatgtgcacttatgcacatcacaaacaanagtctgtctattgcatcatgactctcaaccatactgttttgcatcgctcaccgaccccacgcgaattattggcatccacattgatgcagttcttagtacatcagtgaacagtgtttacttgcacgcatcataaacaaaagtatacttattgcatcatgactc

SEQ ID NO: 36693 - DNA, 351 bp, Glycine max
  unsure at all n locations
agcttcctcataagtcctanatgacatttcanactaggagtaactcactataacctccacataccactaaatccagatttggccttccgactctcaaagactcactgttttttccactcataacaccatattctcactttctaaccctaagttaactctacccttcatccctagcaggtttccataagcaatttcagcacaccaacatcaaaagcatcatcatanaaaccctagaactgaatgggtaagcttaactcactcaaacataacaagtttagcatgctttcgacaaatctcttcacagataactatcacacagcattatccaagcaaaactgcccatcatatctc

SEQ ID NO: 36694 - DNA, 307 bp, Glycine max
  unsure at all n locations
cgcacatcgggcggaagccgctaacccncccccccccaggtactgtgactgccccccaaaaccgccagaaagaggaaaagaggctttttgcaacacggaagggggacacaaccccaaaaagccacaccggaaaaccgaggacacggaaacaacacgaaccaggacgaacaaacgaaagaagcccggacccgaagggagaaagggggacagaacagaaggaaaacaagaaacggggagaagaacacgggaaaccgaccccgcgaagacgaaagaggaaaaacacgaagggcaacagacaccggaaccc

SEQ ID NO: 36695 - DNA, 445 bp, Glycine max
  unsure at all n locations
accaactcattntaatgtgcanaaagagnagtcttcatcntagctcataggtctcgacagaaccatacaaagtttcctaacagatttctaattatgtgggccattaagtctatgatatgtcgcaatagccgagaagccttgaatctcttctgaggcggagtaagtgtccgccataaaccttggccttgtgctaacacagcaggagaaagttcttgacttcccattcaagggtagagcaaaccgatctatccacatggttgcctcttggtgtaaagagtccatcacccttcctctagcctctgtttctgcgtatacttgagcatactcgtccgcgatcctatgctcgtgggctgggggtagacctaaactctctttggacttggcgataaagctaacatgttaggctccgcctcgcataaacgccgagacaagctcttttttgacg

SEQ ID NO: 36696 - DNA, 523 bp, Glycine max
  unsure at all n locations
cgcgtgagctttgatccctcgataccccgccnganccggagatccctagagtcacctgaagcatgcaagcgcaagtttgttttctatgctanccaccaaagaagcgcgcctaggtggagtcacatcgttcacttgtcgtcgatgtagatagatcaccacttgagcctactagattagcctgctgcgaataattaaactcattgataaagaaaatgatgattgtggctcgatgatagcgaacatgatgtgccatgctctaacggcagatattactttcactgcgaccttcagaactcgatgggcctgctccgtgtgattaacatagacatgatattttagagagatactaggacgtgtggagcttaaacgatgatttcattcccaattagattcacgtacgacatatcttttacactacatctatgagtcttgcaatgcacgcttctancaagtagatagcagcatatactggacatcatccttgagatcgttgaaggggcatgaccgtagaaaccagataccg

SEQ ID NO: 36697 - DNA, 391 bp, Glycine max
  unsure at all n locations
agctcgaagtctacagtgtgntaaaatctcatctttggggacaataaagaggttatcagtctttcacaacatccgacattgcattctggagaaaaatatatagaaattaaacatcattgtataagacatcatgttcaaaatgggagagtggacttgcagttngtgcccactgattatcagctttntgacatctctacaaaacgattaactgaggaaaggttgantttgttaagaagtcaacttggaatgatctttattaatgaattatttaatctctatatgtcatccattgttgcatccaaggatatatcgtccactagacttaaacacacactcataacattcaatanatggacaacatatcatgcattaaattttttttttataaaat

SEQ ID NO: 36698 - DNA, 351 bp, Glycine max
  unsure at all n locations
tagctngtatcttatgcaaacggcaataacgttgtactcggatgttcgattgagtcacgtaatacatcgaaacgctcgaaattgagaacagaagctctgtgcatattcaaacgacaatacattttaactcggatgtccgattgagtcccgtaatatatcaagacactcgaaattgagaataatagctctgaacaaattcgaacgacaataactttttactcggatgtccgagtgagtccagtaatatatctagacactcgaaattgagaatagaagagctgagcaaattcaaacgactataactttgtactcggatgttcgatggagtcccgagcgtctcgatatattatg

SEQ ID NO: 36699 - DNA, 380 bp, Glycine max
  unsure at all n locations
agcttccattatgagctctagtttcttggtcctccaccaaggaaccagtagtaacattgtcatcctatgaagctgagtatattgcagcctcagaagctgcatgccaagcagtgtggctagatgccccgatgaagaaattgcaactgganaaatcatgtaaagtgaagttgttggtagacaataaatcttccattgatttagctaggcatccgacttctcatggaagaagtaaacacatagaaacaaagttccacttcctaagaatgtcagcaatgagaaactgaagattgacattgcagaactgaaattcagcttgaaacatactcactaagactttgaagctagaaatgtntagatgtttaagagattccattggaatt

SEQ ID NO: 36700 - DNA, 409 bp, Glycine max
  unsure at all n locations
tttcttatcctctatnttcctataaatagggggagaagtgaagggaaaaaatgttcagctctcctggtaattcgagatcacttganattagtgaaaaaaattgtttccgtgtagaaaatccaagccaaggcgcttccgtaacgtttccatgggtgattctgcgaagattntcaaccgttcttcgacgttcttcattcgttcttcgtcgttcttcggtcttcaacctgtaagttcccgaaatcgaacttttcaattcattctatgtacccttagtggtcctcatttgttttcacgtgtttttattttcatttcatttacttttcgtacccccctttgacgtgctttagtcatttacttaagtcattttctcttctaatcaanaatacaatanatttccaccgatcatttg

SEQ ID NO: 36701 - DNA, 297 bp, Glycine max
  unsure at all n locations
tttcttgatgtgagatatcgtggaagagtcagtcttcctactgttgtttgttgaccacagagtggcacctgaagatatgttgcggaggtcatgagaccttggggatgtcaggtggggtgctattgcccaanaccaagcttgaccaatcccgactcaacccgcgcatagtcagttcttgagaacctatgacgtacctaaacatgcgagctcctgacagtctaccaataatagaacaaagtccatatagcaaggaggcttgtgtggcggctggccagctatgaatcttgagtggtatct

SEQ ID NO: 36702 - DNA, 374 bp, Glycine max
  unsure at all n locations
atcttgcttgtggngcttctatggaggctggatctttgagcttcaatgagatcctttaatggtgattnttcaccatggagatgcagcggaagacaaaggagaagaggtgagaggaggcgccatccactanggaataagccatggaagaaggagcttcaccaccaagataagccttggataagaagcttgaaaggatgcttcaatggaggaaaagaaagagggagagaaagagagaggggggagcacgacattgaaggaataaaagagggagagaagtggaactttgatgaatgagagtgatgcaagctccattggagcttgtaagcctaagatcttcttcatcaatggaattctttgcttcttggaagataaat

SEQ ID NO: 36703 - DNA, 67 bp, Glycine max
  unsure at all n locations
tgcctaaaaaaataccccccgccctgcactcatgcagtactgttgaattattaacattctgcgactn

SEQ ID NO: 36704 - DNA, 369 bp, Glycine max
  unsure at all n locations
agcttgttctttgattttcctaagttctgtaacaagctgagaacaataaacttggccttctcttaattntctttgggcttggcgaccacgatcaacanagtactttcggcacctactatatgttgacttcaccaacgttgttattggaatgctgcgacaatctttcaacaccttattcacacattctgataggttggttgtcatgtgaccatatcgtcgtccagatgtatcgtaagccatgttccttttttcctttgaaatgcgatcaatccatcttgctatggctggactcagttgacgaaatttttctaagttttgatcaaacacatgcttgcaatgagtgtacgctgcatcaaatttggtatcatc

SEQ ID NO: 36705 - DNA, 434 bp, Glycine max
  unsure at all n locations
cgcaaccacccgctgacgaagacccgacgtgcctatctcccccccccccccccggagcgtaactgatgcatcatgcaccccanggaaaacccaccgagagcaagaggaaaagagggccattcagttcccacaagcccgaaagaggcgggcagaacaaacccccccacagaagatacacctcgaaaccccaacaaaaaacggagacaagaggaaacgggggcgacgagcacccaccacaaaggggaagctaccggccgaacccacaaaaacgcgggcacgacaaagaaagcaaccgaaccaggggcggaaggcgcaacaacacgagaaaacgccagaaaaagcggcacaacacacagaagcagccagcccggcccaacgaccaaaaaccaaaagaaaaccgcgcacccccacgacaaacagccgaacaaggacaa

SEQ ID NO: 36706 - DNA, 280 bp, Glycine max
agctttcttgttctctttgttctccatctaccttgaagtggtatgttggccatctgaccatcattttgtctaaagtcgagcatcgtgttcgtcgcactcgagcatcatcagaagtctgtgcttcttctccttcgccacctcacgtaggtatgtttggtctactcctgtataatatattgattgcattcatgtatcgcacacttagtgaactaaacatggctagggtttctcatatttaactcgagcatcatgacaactgtgtgcttcttctccttagtga

SEQ ID NO: 36707 - DNA, 430 bp, Glycine max
agcttgcactttatccaatctatttatcattcacacagcacaggctatgacaggctagcataacagagcaaaggcagagaactctgccagaacaccaacctaaaatcacagcttttaccactcagagaccccagtaacaattccttctttccaattcgttaaccgatggatcaactcctaatttttactggaagtctctaatacataagcctacatattgaccgttgggatctactaacaaacatcccgaactcattctgcactgctctttccacaaccagcaaatgcctattatttttctgcactagtggcaaatcctgctgcacaatttcacagcagaaatctgcacagaaagcagattctgataccacactgtctcttctccaatcttgcccaatcaaatcttacagttccaaatcatgtttaatca

SEQ ID NO: 36708 - DNA, 416 bp, Glycine max
  unsure at all n locations
acgactataatgacctgtgaagagctggtctacgcacttgctcgcttgaggcctgccaaattggctattttcctatgcagctcggcttgtatgtgccttgcttctttagcatttactcacctatttatttctttaagatcttgctgctattcatattttcgcatttcactttctgactcgcattttattcaactatgtccattctggtgaacgtgagatatatcaattgtgaacgaactcgacatcctgaggaagatttaaagcatactcttgatgagaagagaaaatatatctcacatatcagtctcgaagttctaaagagtgaagataggctcatgcgagctttctggtttcttctctgctttatatcaaaagaggatgagtntacgaaacttattccttctcttatgtaagag

SEQ ID NO: 36709 - DNA, 263 bp, Glycine max
agctggaatcactctacacgacaaagttagtggcagatcgacttttcttgaaacaacgactctatgttttcaagatgacagacgaaagaatgttgtccgatcaaattgatgacattaacaagattctcgatgatattgagaatcttgatgtagagatggaggatgaagacaaagctctaatgttgctccatggacttccaagtcgctatgagcagtttaaggatgctatattgtttggaatggattcaaccattacccttgaa

SEQ ID NO: 36710 - DNA, 438 bp, Glycine max
  unsure at all n locations
agcttgaatgtgcgtaccccaccattttttcatagaaaaacactggtaatgtgtctactattactatgatcatctctttctccgtcattaagggtgccatatgggctgccaggtctctccacctttgggcatattctttgaaagattcatgccccctcttgcatatgctctgtagttgcatcctatccggagccatatcagaattgtaccgatactgcctaacgaaggcacccattaggtccttccaagaatggactcangaaggttccaagttagtataccangtgacaactgccccagtaagactttcttgggagaaatgtatcagcagtgtctcatcttttgcgtatagcccccatcttctgacaatacatctttagatggttcttggagcaagtagtccccttgtacttgtcaaatttcagcaccttgaacttg

SEQ ID NO: 36711 - DNA, 387 bp, Glycine max
  unsure at all n locations
tagctngagttgangaagtgtagaacggtgaaacttcctgctgttattcgttgaccacagagtggtacctggagatatgtcgcaggggtcaggagaccttggggacgtcaagtggggtgccattgcccacaaccaagcttgaccaatcccgacccaacccgggcatagtccgtcagtgagaacctgtgatgtacctaaacaggcgagcttctggcagtcaacaaataaaaggaacaaagaccacaaagcaaggaggcttgtggtggctggccagctgtgaatcttgtgtgatatatgggttatggcctctggtaatccattaccaacggtgggtaatcgattacaaagcttataaatgaagacaggagactangatggtctctggta

SEQ ID NO: 36712 - DNA, 346 bp, Glycine max
  unsure at all n locations
ttcttgtactattcctttttctttcaatncagaccctactgtcatgtttttaaatattgatatttctattacatatatgtgtcaaacaatccaaaccttcactatgcatcaagcacacaaaagtacgaaaatagtcactgaccctttcgcagccaagtcaacaatgtagcaccggttggtcacaacgaacttgttcattaccagcgtcttccttgcaacgaccattaccatacatgagcactaaaccaagcttaaatggtacccgcgacatgtcttctacactacaccaagcttaacctaagaagtaagtaagtgaccaacgtaccgtggacaaagctctgatctt

SEQ ID NO: 36713 - DNA, 88 bp, Glycine max
aggatctgtcctgttgctggagaggtcataattgctctattgcggctgatatagctgctgaagtcgatgaagtctattgtaaatgttt

SEQ ID NO: 36714 - DNA, 243 bp, Glycine max
gtgggctccatgtctgctttccaaacggaaacctagcgcgcctgctggttaaagaatcgtcaacgcagacaccttgcgtgagccagacccatagatataactatgggtggccaatgaaaataaactgccaatatttgatttgttcttctatgtccgggacaacgtcgtataatggacgctaactctttaaaaaaactccgcgctgcactattgggacgagccaatctttcttctggccaagag

SEQ ID NO: 36715 - DNA, 401 bp, Glycine max
  unsure at all n locations
agcttgtataatggccagacatgatacatgtcaaggttgggtttggttcaacggtaaaagggatgccccacattatttccatgacatanatgcaaaaatgatgatttggaaactttatgcaaaactggtcatgcatgcacctatgcggacactcaagtgtcaaatttttatggtcatgtgatgctanggctcaagattcatttcctccattttagtcaacccaatatttccaaaatatgttcttttatcaatttgtgcattcatccgagtccatttcgggcgtccgggaaaattttcacagcattcacccttcaggtgtacacattgttttttanaaactagttatgatcaacgatctctttcaaagaaaagtgnaagtcatctcttgtcaaaagcatgtc

SEQ ID NO: 36716 - DNA, 308 bp, Glycine max
  unsure at all n locations
agcttctnattatctctctcactaagcgagaaatagctggacggtgtccaccaatcattactgtacatagaaactgctgatatacaccaatttgggttctaacagaactactttantaagttacaactatagaacaaatctgtaacataccacatactcttatccacaacaagtggagtcaccaactttattattgaatgcctccaaggaagataatgcaccgttcatggtggcgctataatgattgttagcatatcctaataatatatataaaccgtactaaatctgaggagtaaaaataactcttt

SEQ ID NO: 36717 - DNA, 432 bp, Glycine max
  unsure at all n locations
agctntacatcagnatttattaatgacccactaacctagaattaatatagcttagtgccattaacctagggaatttaaaaaacttaatggctgagtgtaactgaaattgtggcaaccaaaagtcaccctcaacagccaacaagtcagccaccatttggtctcccaaaaggctgatgcctaagttgccaattgggcccttattacaacttgaactaaacctaactaaagcccttttagttgattaacccaaaacatatttttggtcagccaactctacaaggattgggccattatttagacaaactaaacactctattattgagacaaagtggtgtcatttattccttctccatttgggccatgatacaactcacaaccttggacttttctccttgaaactgggcttgtatcaaatatatggacacacttgtg

SEQ ID NO: 36718 - DNA, 307 bp, Glycine max
  unsure at all n locations
atgcatgtgagtangaagaatcacagatcaagccatgctattgtgcaagcaatcaatggggcanaacacaccanatgattatgatgatggatggctcanattctcacanaagtaaactcatcattttctttcaaattgagctttcaaaactatcatgacatgtagaggagaatcaaagatntcaagtcacaaaatgtcaaaaacttttattttcaaaacaattacccatttcttgaacatatcctataattcaaagaaaaacatgcaaagtcgtacatgcacacagaattgacctaaatattaaact

SEQ ID NO: 36719 - DNA, 453 bp, Glycine max
  unsure at all n locations
agctncaggtcttctatatggaactcatganactaaancagcatgatgagaatgacgagataaagacaggaatgacacttanagttttatcttcagttcaacaagatagtgataaacaagacttgaatgaagtagaagagatgatgatttcagtttcttcgtaaagagattaaataaattcctaagagacaaagataatcatagaagatcacacttctaaccaaagaaaagaggagaggattcatcttttgttccaaagtgttatgaatgtaaccaaccacgacatctgagagttgattacccgagtttcaagataagactggacagatctacgacgaaactttcactgatatgacagcaatagagcttacatcacttgggaatataacactatggattcatccgaagactcacaaaatgacctcatgaatctaagtcttatggcacaaaata

SEQ ID NO: 36720 - DNA, 329 bp, Glycine max
  unsure at all n locations
agcgagtattagtgcgtatttatgaccctaatgatcntgatacggaaagaatgataacacgtctttccttgtcatccaaaaagtcatgctatttttttttgagtgtatcaactatacaaaagttacacacaaagcaaacctgttttttagtgtgggccgtattaatattcttctgaaatgaggtcttgcttaatatttttttcatttttaaatcctatagaaatcctctaatttatgtgctttcgttatgccgactaccatatttagttgtaaaacatgtagcaaatatttttagatagttatgtgttcaatataaactttgtgagtat

SEQ ID NO: 36721 - DNA, 349 bp, Glycine max
tcttatgagggaggtttctcagttctaattaccaataaattttctgaatgaactttttccacttgctagtatacactggtgacactcttcattttatcttattcctttttcaaatgcatgttgacactctctttctatgtgatggaagctactaagaactttctaactgccatgttgaaatattctctcccatcttgttgaaatcacttttcttgctttaactatgacaccataacaaatccatgtcctgcttctatcgtgtacgcgggaattacatatgctacactaccacactaatttatgaatcacctgacacattcaagtgaatctcttctgtttggacccttac

SEQ ID NO: 36722 - DNA, 426 bp, Glycine max
  unsure at all n locations
tatcttctctttcaatnnnctataaatagggggagaagtgaagtagattagggttcatccccttacgcacttctctctttctcgaaatagctgaggaaaatcggttccgtgaagaatatccaagccgaggcgcttccgtaacatttgcgtgagtgatntcccgaaggttttcgaccgttcttcgacgttcttcattcgttcttcatcattcttcagtcttcaatgggtaagtacctcacactaagcttgttaattcattctatgtacccgtggtggtccacatttggtttcatgtatatttattctcgttttcatgtactttttatacccccttttgacgtgcttaagccatttatttaagtcatttctcgcctattctaaacataagatatattttcaccgatcatatgaattgtatcaatccgt

SEQ ID NO: 36723 - DNA, 366 bp, Glycine max
  unsure at all n locations
tatctnnggttgttttatatatgaatacataagattatagtgctgctactgtgtttcccatctatgtcactggctatagaagtcaaattatacaatcttattctactagcatcaaacattatagatggtgtaaaataagacagagaacatatcctcaaacgaagataatatattctgatagacagatgagaccaattagattgtagaaacttttcttgggtagtagacccatgaaccatgttcactatacaagtacattgtggcagtttcgacctaccaaatttgtcatccctggggacttcaattggaatatggttctcccaaaatctacttactaactctaagatgtactgatgacacttacta

SEQ ID NO: 36724 - DNA, 382 bp, Glycine max
  unsure at all n locations
tatgcttgtattattatggngtacccatcacatgtggtactaggtggcggtcgggcgatggtgcacaacaagttttccacatccacaatgcgcgcataaacccatcattctctgttgcccaccttcaactgagctcacgtactcccatgtagcccatatcctcgtttctctcaacaccgggtctccattaatcctcccaagcttgcccaacatcaaagtaatacaacattcaaacaacacaagctatcacaaccaagcaaaacagggcanaggcagaaaactctgtccaaaacaccaaccaaatcacatctattctcacttatagaccccaataacaatcccttcgtccacacgtagagacgcgcttcacgactccggaaat

SEQ ID NO: 36725 - DNA, 354 bp, Glycine max
tatcttctattacactctagacatcttctcaaagatcccagcggtcagatcatggaagattgtcttttaaagtttcaaaccaaatttcgagaagatccaacggttaacgaaggttgggcagcgcttttaccgaggcagcttcatgtagttctctctagaagcttcattaagaggcttcctccaaaagcttcattaagaggcttctagcacactccagacatcttctcaacgatcccaacggttagatcatggaaaaatgtcttgtatagttgcagaccaaatttctagaagatccaacggttaacgaatgctacgcagcatttttaccgacgcagtttcatgtagctttctcta

SEQ ID NO: 36726 - DNA, 358 bp, Glycine max
  unsure at all n locations
tatctngccatctatctcgcccaggcgagctaggttgcttcctccagaagcaactgccttctggaggaatattctggaaggcccaagaggggcctatttgttatttgcaccctcatttttactaaatacaccccttgatcttttntggtgattntttttccgtaacgttactaaactttacgaatttcataacgatgcttgttcgctttccgtaatgttatgaaaccttacggattacgtaatcatcccttttttgccttccggaacgctacanaactttacggattacgcattaacactttcttttaattttcggcatgtcacagaacttcacggattgtgctacaatgctttcttt

SEQ ID NO: 36727 - DNA, 404 bp, Glycine max
  unsure at all n locations
agcttgcatatcanagatttgttggaggaatcaaatcctggaggctgctgcatgtacacttcttcttgtagaatgccatggagaaagacattgttcacatccagctgctgtatgggccagtgataggtgacagccaaagtgagaagaagtctaacagtaataggcttaataactggtgaataagtctcttgaaatctgtgtcatattgcttgagggcaaagttgattgaggcttgtgattanatgaagaggaagagggaaagaggtcatacggaaatctggactcattgaacaccacatccttagatatgtagattctgccttagaagaaagacattagtagcctttgtgcgtangagaatatcccagaaaatgcattcttgagactgaattgngagttattct

SEQ ID NO: 36728 - DNA, 294 bp, Glycine max
  unsure at all n locations
agcttctctctatatccctgatgtaagactatgcctagactaaatagcattattgtaatactataattaagaccaaaacttaacttgcacatctgtcatgtaaggctaagtntcaatcaagttctaaggcaatagtgcatttcccaatgctaaagtcacctaactgtgcacacaaatgggtgatcagaataaaagcatacaaacattaatcattgaaggaagcattgaacacagaanacataatcaattagatattaggtatttacatcagctgttcattacaaatccccaact

SEQ ID NO: 36729 - DNA, 316 bp, Glycine max
  unsure at all n locations
gccacccacaacaaagacactaaatcccccccccgcaggtactgtccctgcaccnnnnaacgagggaaaaaggaaaaaaaccttttacaaaggaaacacggggaagaccccaccacaaaggaaggaaaaaagaaacacgggggcacacaaacaaccaagaaacaaaaaaccgcaaaagaaaaaagacaaaagacccaacgcaaaaagcacgcacaacaaacgcgacagccggaacgcaagaaaacacaaaagaccacggaaaaaacagccacagaaaccaaaactcagacaacgcgacagaacgaaaccgaaaacg

SEQ ID NO: 36730 - DNA, 477 bp, Glycine max
  unsure at all n locations
agcgtgaacattgaatctaganancnagcaantcccgggatcctcaagacgcctgaagctgcagcgtatgttacccatttaactaaggcgtcctaagcgaaatgattgataagcttcgccagtatccccatgaaaaaccttattcaacaattcaagttagtgaaaagctaacgaaaattagggacttataaaactaattccttaattgaaagcgtacgtgacaatcatagtgaattactaaacaagattggtagttacttaagtcataccagatactcccgagccttcgacaatcttccaaaatggaacaagaagcacctcaaattatttatgttatgaatgaagatagtgaccaaaactttgatacacaactgagatatgatcagtgtcacaaaagaatataaatccaataattccatcactggaaacacctgtaattttatataacgccgctgccctgcctttatagaaaaaagg

SEQ ID NO: 36731 - DNA, 358 bp, Glycine max
agctagaatatatggtgtctttcacatgcggactaagtgccagtcaggcgatggtgcacaacaatttttccacatccacaagtcgcgcataaatccaccatccgctgttgcctacctccaactgagctcacgtactcccatgtagcccatatcctcgttgctctcaacaccgggtcctcatcaatcctgccaagctatcccaacatccaggcatttcagcattcagacagcacaaactaccacagccatgactacatggcaaaggcagagaactctactcggaacaccaaccaatatcacacgttgttctctcttaaagacccaataacatttctttgaccaactcatcaccggagat

SEQ ID NO: 36732 - DNA, 188 bp, Glycine max
acatctttatattcctgccataagaggtgaacactaggagaaccataaatagtgaactgactataatcatcactctctctcttttgaggatcactcttttgctcgggagtatcactcttctgtttcatattcctttgaggagcctcactattgactttctctaaggctctcttttctctcattctgat

SEQ ID NO: 36733 - DNA, 389 bp, Glycine max
tggattgtaatgaaatgatcggaaaagtattcaagatacttgaaatgcaaaaaaaagccttgcttatataagctcttcatgtctggtcaagatgaccatttagaagagttataacttttagaaaaacttaaaaccaatttgaaaaagtcaaaaaccttttgaagagttacatcttttgatttattcagaaacagtcactggtaatcgattaccaaattagtgtaatcgattacacaaggctgttaagtgaaaggatgtgactctacacatttgaatttgaatttcaacgttcaaagtcactggtaatcgattaccaaaacattgtaatcgatacagatttttaagataatagcagcgtatatattcagttgaaacattttcaactcatt

SEQ ID NO: 36734 - DNA, 343 bp, Glycine max
  unsure at all n locations
tttcttgatttgangaagngtngaagggtganacttcctgcgtttattgttgaccacagagtggtacctggagatatgtcgcggaggtcatgagaccttgnggacgtcaggtggtgtgctattgcccanaaccaagcttgaccaatcccgacccaacccgggcatagtcggtcagtgagaacctgtgatgtatctaagcaggcgagctcctggcagtcaacagataaaagganaacaagaccacanagcatggaggcttgtggtggctggccagctgtgaattttgtgtaatatgtgagatatggcctctggtaatcgattaccaagggtgggtaattcgata

SEQ ID NO: 36735 - DNA, 277 bp, Glycine max
  unsure at all n locations
tgctntanatcacagcaacacagaatctaagtgtccaacacccctcctttcaatgaggtttctaggtttgaaaagtgaaatttagaatgatgtanatttgaagcaaactctcacctcacaccagtccataacatctatttagacttgttcanactgggattacacctaanatctccccgaatcanaatttaactcttcaacacccaaattgccctagaaatggctctnntgtcactttggtcatttgttttctctctgcacagtccaagcttctcat

SEQ ID NO: 36736 - DNA, 302 bp, Glycine max
  unsure at all n locations
tatcttgcattatttacattctccnccattctgaaccaaagtattcttgacatcatcaacatcttcatgatttacaaatgttaaaaccaaaagaaaaacataaatttgcaaactcaaaatataagttttacattactaacgcgaatagaattttcaatgtattattaaaggataaaaaaattacacttagtgataatcatacaattcatccatctgcgcaatgaacaagaaagagatattacaaatttcactatgtctttagacattggactaataattgtttacgttgtagagatatgata

SEQ ID NO: 36737 - DNA, 368 bp, Glycine max
  unsure at all n locations
tagctagatgttgctttaacatttatccctatagaatgttgactgtgggttggtgagttcgttgtttcgcaagttnttgacataatcttggctcctggttggtgggttggtgagttggtgagttgctaagttcgtgagttcctgagttggtgtgttctcaagctggtgagtntgttgtttaaaactgttggttctgtttactgcaatgattgttattggtgcaccattttcttgtgtgctgactgtcattgtntttgtttagggtataagacaacaagacgtagtttgcattggatatttgctttgaacaatggttttgataaccctaaacactaacctaagactttgttgcttactcctgtgcacat

SEQ ID NO: 36738 - DNA, 359 bp, Glycine max
  unsure at all n locations
agcttatctcatatgcatgaagatctcacttttttcataagaggtgtggctctatcccatctaggaggacatgtttatacttgattcatacgtaaagttaagttcttttcttaaacttgatgaaatgtggagagcatttcacatagatctccaactacacgacatgaaagcgaggacatcaattcaccgctatcaagtatgcagccaatgaacanagtcatatgcactaaaccgagattatcaaaagataggtaacctatacgtatgaattatgtataaaaaatgactcttcctaaactatacaaacagacaattcaggattcaatacaatggattatctgaactatccttattactca

SEQ ID NO: 36739 - DNA, 139 bp, Glycine max
agcttattatcatcaaacttggagaaagagttcttggggtcaagacatgagaagcaatcaagtataatgttaccttcttcactaaagcggtgatccatctccacacatattttatcaatagcaacataaaaaatctctg

SEQ ID NO: 36740 - DNA, 280 bp, Glycine max
  unsure at all n locations
tgtttgcaagcttcaattttcanattcgagcgtcgcgttatattataggactcagtcagacatccgagacgacagttattgacagttgaatttgctcagagcttcaacattcaatttcgagcgtgtcgctatattacgggactatatcagacatccgagttaaaagttattgtcgtttgaatgtgctcagagcttcaacattcaatttcgagcgtgtcgatatattacaggactcactcagacatccgagtaatatgtgtttgtcgtttgaatttgctca

SEQ ID NO: 36741 - DNA, 304 bp, Glycine max
  unsure at all n locations
cgaaagcgccaaccgagagaaggtcctacacccccccgcgggaggtgctgtccctgcccnnanancgccggaaaaggggaaaatgagtttatccaaccgaaaggggggaaaaaccccaaacccagacaaaagaaacacagaaacgacaagggaaaaccaaaaaaaagggaccggaggggaaaaaagaacggacggaaagcaacacacaaaaagggacggaaaaaaaccgccaaacaaaaacggaaaaaagacaggagaacaaacggcaggaggaaggaagaaagaaggacacaaagaggaacaa

SEQ ID NO: 36742 - DNA, 257 bp, Glycine max
  unsure at all n locations
catcatcattctttaccatcgatttatttttctttgtttaaagcgagttcgaccaatcggttaccccgtaacctcacttaatcaatgttanaatgaaattcaatcgatcgtttatgttgtaatctcgtttaatcaccagtaaaataaaattcaactgatcgttatgttgtaacctcagttaatcatcaaaaaggtaagtttcaacgggtcatttgcttttgaagttcgcttttaatgagttgataataaccaagtga

SEQ ID NO: 36743 - DNA, 308 bp, Glycine max
  unsure at all n locations
agctaggatgttgatntctgttacaggaaggaccagtagtggatcgcattcaaatgactggatcgaaagcattgaggaccctgctttgcgtctgagtgttgcgttgttggcgaaagagttgcgcagcatcaaagctaggatcattcggcaagagaaaaccagctctgcaccgatctatttgggtacaggaataatccaagagcagagtgcctcacaacaaataaatctgaacgagatcgacctctacgctctcaaagccgcaattgatccagctgtacttggcccatcgtgattntcaatcggtaata

SEQ ID NO: 36744 - DNA, 432 bp, Glycine max
  unsure at all n locations
agcttgttctaatccagtaatgcgtcttgggaagtgaaagtaagtagacttttctttgcaagagtgtaagctctatcccgaagaatgcatggtcattggctgccatgttttcaattanctccataacttcattaagcattnttaattccagagacatctagaagttacttcaagttaggtcgtaagccattgataaagatatntagttgtattggctcactgaatccatgcgttggagttcagcgatgtaaaccacgaaagcaatctaaagcttcactaagtgattcatctggaaactgatgagatgaagaaatctcagccttgtcttatgccgtcttggattttggaaagtatttctgcaagaatntctccaaaacctcttcccatttcttaggctatttcccttgacaagtgaaccatctttaacttcct

SEQ ID NO: 36745 - DNA, 468 bp, Glycine max
  unsure at all n locations
tggcactgtgctctagaatgacgccctagaannccncgncaattgagctcggacccgngatcctctgagtcgcctgctttatgcancttgcatctgatgngngacatcntgnacttctgagttatatttcattaactgcgcattatgtngatgcgaactggaaggtgaatggtaaaatgggtaatctttctcatttttcctctccacactcggggcgtgagatggctaaagtatatatggttttttcggaagatggtggatagacaaacatattctcataattttgatgatgctcttcactgttaaagcagacttttgaggaagactttctactatggttataaagggcgggaatttttatattgatgtgtctacatttaaacttaggtcatgagggtgaagtatcggcctgtggaaaaaaataggaagcctagttgttaggatcaagggaagaagttttaactgttg

SEQ ID NO: 36746 - DNA, 363 bp, Glycine max
  unsure at all n locations
tttcttgttttgtatctgggccggatccctgaacgtagattaatgagttaagcttgtgaacatgtctctactancgccttaattaatttattatcgttgattgtacgtaacgtgttgattaatttattaacgttttatataaanttcattagtgagataatnggtacttttttataccaacatgttgcanatggatattntccanatatntacttagctttcaataagcttaatttcttctcttagaactgtgattgatagtacgtgaagtctatctttcttttttctcctttgtgtacaagagcgagaatgtttggtaattagatacctgaacgtggattaatgagttaatcttgtgcattt

SEQ ID NO: 36747 - DNA, 352 bp, Glycine max
  unsure at all n locations
ttctntattttaactcatcaacattacattttacagatggtgtaggaagaggggtccaacaaatagccatctctttccttctaggagtgagtgaagacatangactagcagttatctccttacaaatcaccttggccatatttaatatcattatttgttaaaattttatgtaatttcttcaatacaatcgtagaatgaaactctatatttatgacaatcctcaacttattgacaccatcatttccacttctcanatttacaccatgtgtggtggtaagtaagaaatanggttgaaaagatagagggaaggtgaanatgagtaaaagatacacccatgttataccctcccccc

SEQ ID NO: 36748 - DNA, 518 bp, Glycine max
  unsure at all n locations
agagtcagtctaggacntctngcanantcnagcnnannncccgcagagnctctanagatccgtctgcggcgacgcgagcgcgtgcgtacttctctttgcgtcgcgggaagagaagagggagactaggtttatttgtgagactccaagctccattccgataaattgcctggtcattggctgccatgtagtcaagtaacctcataacatcaccaagcacttttaatggcagaaacatctataagttacttcgagttatgacagacgccattgatcaagatatctaattgatggcgtcacagaatccatgcgtagaagttcagtgatgtatacctcgaaggcaatctagagcttcactaagtgattcatctgatactgctgatatgaagagatgttgccttgtcgtatgccgtcttgattttgaaagttattctgcagatattcacacaatctctcccttatcttaggctattccctcgacaacgaagccttctttatctctctgcacgggtaatgaaatt

SEQ ID NO: 36749 - DNA, 355 bp, Glycine max
  unsure at all n locations
tatctcttaatattttttgtccatgcaaatattataggctatttctctgcccncactaaacaaatttatggatgcacattgcacagtgggtgcacaaaaatgtaatgttgtcattggtatatgatgtatgcacaattggtgcataaggtgcacaattgatgcacaggtatatgagtagacatgtaagttgagagtgtctgggtggccctcaacctaatgctggaggtttcgtggtgactaaatgaaattgacctacagaataaacgagtgatcaagatccttctatacatacgattttgagaaccatagaggtaagacactacccatacttgtctacaaacctcacttcctatgt

SEQ ID NO: 36750 - DNA, 185 bp, Glycine max
aaaaaaaaaaaaggggaagagagagcaaagaaggaagtaaatacaatgcaaaaaagaaaaacgaagagaaacaaaagaaaaaagaaggaaaaaggagggagagaaagagaaaaagaagaagaaaaaaaaagaaaatagaaggagagagaaaagagcggagaagaaggaaggaaaaaggggaaaaa

SEQ ID NO: 36751 - DNA, 345 bp, Glycine max
  unsure at all n locations
agcttatgttatgctatctataagactattacaaaactcattgcctctagattgaagcaggttatggacaagctagtgtctcccgcattagatgagctttattctatggtgctagggcagagacaacattattctagctcaggagatctgccactctatgctaactcaacatgaaagcaagggtacatggcgtggaaagtggatatcataagctacaagatatttgttaataagagtttatgctggacacttttatgcgattgatcgtcaaccattcaatcattancctcatattccattgtttgtctatagcctctttctatgtatgggcaatggagataaaac

SEQ ID NO: 36752 - DNA, 378 bp, Glycine max
  unsure at all n locations
gcattctacagngactntagacgtactagatgattaaggttattgcgtgagggtatatatataaactgttcattaattgagaactcctataaagtgagatgtttntccttctttcttccctttattatctttntgttgagaaagtaatgtgaatgtgaatatgctttgctgaggttagttttggcctttttggaccacgtcaccgtcacaagaattaagtaatactganaacatgaattggtcttggcaactttaatatgttagctgcacattataaaatattgaagacttgaatgtactgaaacatgaatnggcttttccactttaattgttactggacattaacatgacttgctttttacatggattgcaactttc

SEQ ID NO: 36753 - DNA, 514 bp, Glycine max
  unsure at all n locations
naatactaaactangcattcnannncgtangtttgngaagtcgaggacnaangnnnnngttataatgaggagacgnnaacactcnatnttctagcnncgnnacaaccaaccanctagtattgttgttagtaaaccataacggccacccacaccacgcacccatatgagaaaggatgggaattaaggcactcactatatagtgggataaacgggtcctggatcttggggaaaatttttcttgacgaccataatggatcaatgaacggtagtagctgggctgcactgacttattctgatgataactggaaccaatagtcatattgtagttggatacaccgcagtacatgtttcacacttgaaagtaatctcctgaataaataatcccctactgaactttactaataaacctacaatttacattttcaaagaaaaatctaaaacatattccttgatacatacagacacttttaaaagaatcgaaacaaaacgctacaccaacccacataccgaatcg

SEQ ID NO: 36754 - DNA, 516 bp, Glycine max
  unsure at all n locations
nggaggaatgaatctttgcattgcgacccactagtgataagttctngggcnanggannnnnanntcagagaggtggaggaggtgtctttanttttttcatcagnacatccaccaggaggcttgtgtatttaaggaaaccctctccttgtgattcataagatccttccacccaagcataaagaccttgtgagtataactattccttgttcaattggagaagtcactatgtgaaaagctcttattgacctgngagccaccatatatataatgtggctctccatgtgtacaaagatgtgagcgctacagatcatgccaactaaatgactctcctattggtcgaccgtccattaccagccatatggagtaaatgcatatggtgttgtctacaagaacatacatttttacggtgaattcgtggaatggatattctcaaatatctgacttcctggcaattggaaagcgattcttgatactctagccgttatatgantgcttaataaaacccgaatgtgtcct

SEQ ID NO: 36755 - DNA, 332 bp, Glycine max
  unsure at all n locations
cctctncgcggggagctggtgtgcagccaattctaggttgcctcctactagcgcttctttaacgtcttgagccggacgcgtgatgacgatttgtcaatcatgggcccaatacctactcgtacctgctcgggtggttggtttcctacttgtcggccacgtgtcgtagacaacgctccagcctttgtagatgagctgaggtggaccctggaggtggtggcggtgcgtctgttgcccgctgctggccgtccccaggctgctgtggtgcctcaccctatgcctgcctaggggcgcagtacttctcgatgaaagcccagataatgatgggctgatga

SEQ ID NO: 36756 - DNA, 308 bp, Glycine max
  unsure at all n locations
aagagagaacaacacaatgcttanaataagtgtgcaactcacaacttctaaacttgttttttctaaagctctcatggtaaaaagtgagttgtgaatcacatgtgagatcaagagacttattcactcaagcaaacattttttgcgtgtgactgataaggtctttatctctctttgactcaagtttttgtgggttttcatgttgtagcatatacatgaatttctaaagcatgctatgataagttttctagtttgcccaagggaaggttctcttaacttttaaagttcttagggtgggaccttatctcttt

SEQ ID NO: 36757 - DNA, 530 bp, Glycine max
  unsure at all n locations
nggtggatgagngcttgcatttcgncanncttgntatngntcnngcnccangngnaanaggctcaatggaggtggcacacatccatattcaactcgcccaaacaaataaggagtcttctctactcaaagatagctccctacnctctcctacaatcaatatagaacctatatcctaatgtcacatcctatcagagcgtggtgttcccgtgtcctctagcatgagattctatatagtcatccacctattcatctgctccccccgacacaagttcaagatcatcacaggatctcaacacaacaacacacaaggaagtgagtatcacattcctagcttatacagaaccagaccattaatattcttattatataaatgagataccccttgcttaaacatagctcacggaaccttcccacctcgtcgttcaaaattaccttttacatcatcatgcacattacacaaaaatcccccccttcaatcaggatattttaacccattcattggcaagcgtatgcgtaaattgtgcctagcg

SEQ ID NO: 36758 - DNA, 265 bp, Glycine max
  unsure at all n locations
accattattgcaccacccacatcccattttatagagagaattcttcttcttcttcttcttcttcttattcatgagattgattaatggatcgagggtctcttaagttgttacgaattctgaacacacaggaagggttgtgcctatgttgttcaaactttgtaaaatgcatcttacaacatagtgaaaatctcaaaccggttgttggngattatacttcccacaaggcatgaccgaactagtataaaaccgagttcgcttctctctt

SEQ ID NO: 36759 - DNA, 182 bp, Glycine max
tatcatacaccagccgtggtggattttgtggtaagcgtaaaacctgcactgagatggcgtttttaccagcaggatatcatgctgcgatcatactcaccatgatgatcgtgatcatcaacctccaccatcccgtacctaaattttaccagcgtgtgcaccttaccaatatcctgcgacactct

SEQ ID NO: 36760 - DNA, 282 bp, Glycine max
tattccgaggccacttgatccggcgggtggtatcaaagcaggtatctcgtacaaagtttcacaactacaagattcatggcctccttaaattttctgtttctggaaggaaattccatccataggccacccatatttaatggtgagggttaccactattggaaaatccgaatacaaatctttattgaagccatagaatttaacatttgggaagcaatagaaatatgaccttacatactcaccatagtagatgtaagcacttaccccacagcacaaaaacctata

SEQ ID NO: 36761 - DNA, 159 bp, Glycine max
taccattggaatttctcgagagcgggcgatgtgctatatatagcgcctcgatatattatacacctgaatcagacttgcgcgtgacatgacatgaccatattagtttatcgcgagcttatgatcttcaatcaacgcatctcgaatataatgtggctgaat

SEQ ID NO: 36762 - DNA, 476 bp, Glycine max
  unsure at all n locations
nggtggctgaaaccttgacatncnancnncttagnnnatagtcagncgcccnaagnnanangaaccgacgatacgaagagcgttatttgattctccaccatgcctacaacagtgaggtgtgtagtgagtataatagcatcagccactacacaatgcgtctagatctatttgcntgagatgcagatggatgagcctctgatctcaagacaggatactttcgaggaaggactgatgatgacatgaccaccgccaagaccgataaggccaacagctcatgacctatgttactaaccaacccacgcattggtacacacgttggttttttttctttgaatgatataaggaagcccatcgcaaaataagctctttgcaaagcaaacaaaatactgtgttgcaaagccaatctattggaggcaattattcagttaaaaaacaatttcctcgatatgcccaaacgtcaaagcaatgcttcgaat

SEQ ID NO: 36763 - DNA, 115 bp, Glycine max
tgagtcccgtaatatatcgagacgcgtggaatgtatatccgcaactctgagacaattgaattgacgataactttatacacggatgtgcggctgagtcactgtaatatatcgagac

SEQ ID NO: 36764 - DNA, 316 bp, Glycine max
  unsure at all n locations
actgtcctctntgctnttatcggggaacatggaccattcaaaaaagcataaaatcaacacataactttaccgcttttgcatgaactacgtaggtctggtttcctgatcgcaattgaggatacataggagcaaaagctccgcttttgtcgaccaccccaagagatcgttaatggtacaacgccttaacgtttctctccttccaaaaaccaagagatcgttaatggtccaacgccttaacgtttctctcctttcaaaaccaagagatcgttaatggtccaacgccttaacatttctctccntttccaaaatcaaaaga

SEQ ID NO: 36765 - DNA, 247 bp, Glycine max
ttaccaatgccactccttcatatgattatatttttgtactgtttaagtagagttctcaatacataatgtgatccatgggccagccattaaggtcattttgacaggagcatgtaacagaacagcctgtataaacaaaacatgatttttaagctacttttgaatggattctcactgttatgcacattctgaagctacttttgatccatcagaaatatcgcattttctctatacgcatgcaatggtcatg

SEQ ID NO: 36766 - DNA, 423 bp, Glycine max
  unsure at all n locations
aaatgcacccatatacaatgaaggcagcttcgttacctagattattcacacgtacctccaaggtgtatttgttacttacatcacacacatctccttggctaaactcacatacatgcatactcaagcattgtggggcaccaaaaattgcacatgtgcacatcttggcatttctaatacctacatacgcaaacttcatgatgaatcttgactatctacacaataaggtgctacatttcatgctctnttttcaagtttttgctatctaaagccgcatgcaattcaaacatnatttcctttgctgactanaattgattccaaattaaaaggataatttttgtaatatggtttcttcacataacatgcaacatatntatatatatttttttgtgaaacattttgactacccaaatatatatacataca

SEQ ID NO: 36767 - DNA, 246 bp, Glycine max
atctacacaaggtctgagagaccatacatgattactaacgatttctaattatgtgggccattaagtctatcatatgctgacaatagccgagaagcccatgaatctcttcgggggtggagtaggtgtctgccatcgccttggcctaggctaacaagcggtgaagatcttgactcccgttctaggtcaaagcgaaccgatccatccacatggctgccttttggtgtaaagagtcgatcacccttcctc

SEQ ID NO: 36768 - DNA, 209 bp, Glycine max
  unsure at all n locations
gccccactctatcataggatagntcctgacatctcaaacaaacaaatggggtgttcaagacaattatagtcactgtttgaatacctcacccactcaagtgtatcacacaattatggcttttctctaatgaaacactctaattccccttgagttcttaagcaattcaagagattatggccacaacaaagaacaatacaccaatatgtgta

SEQ ID NO: 36769 - DNA, 421 bp, Glycine max
  unsure at all n locations
tgcccgagtcattcatccctatgaagtgttgttgttgtattggcgatcgaaattgccattccctgtgttatggagttgaaccaagctcatgctttttcgaaaaaagttcatcaaatcaagttgaagaatggaagtaactatcttgcaaaaattggggcaaaagatgaatcgagtcacatcactgcttcgtctactgccaaacatatttaggattgttgatgttcttggtacttccagtttcaccttgacaaagatgtcatagaccatgtggaanatctaaattgattcaaccccatatcctgcacaatacttcaactgtacatcattcgcatacatccatgcttttcattgggtgcattgctcattgattctttctttgaaaagaaaaataaataattaattattacataaataaaatgat

SEQ ID NO: 36770 - DNA, 234 bp, Glycine max
  unsure at all n locations
cttcacaaagtgcctatatttgtttcagtggcgtaaacaacaaatttcaccactctacgcatgtccaatttttagaagacatttttccttattacccaaattcgttgccaatctctaactccccttcagcctctatacaacctccctttattccattntattgtgaatgtatgaattcagggttttgatgatggccaagtagaatcaaacgaggttgcttcaaaaaacattcaa

SEQ ID NO: 36771 - DNA, 250 bp, Glycine max
tcacaggcacggctaaaggcgtgttagtctcctgaaaacaacactcgtggtagcctcctctactaagctgcccttattagtagtctttgttgtaataagagacttgtcaaactgtactcaagtcatcgtgatgttgattattttgtatttcacttccttgtgacggtacattctagggctataaactgaccctacataccgtaaattccgtaaaattttcgcataagggtttggggttgttttcatcatt

SEQ ID NO: 36772 - DNA, 518 bp, Glycine max
  unsure at all n locations
aaagggtagtgngtttgtatnnctgcancattgatgatangacctgngcgcngangcngacgaatctgcgtgagcgatgtgcaacaagatctctttggagattaactaatctcaaccggaggggtcataagataatgacacgccactcatggtacatatatgccataacatagaaggtatatctcaacctaatctgtcgcagcactccattattatatattacaattatccatgtttggcatgtacatgtgagtccctgcaactattgtctcccccaccatgacggaagtatctcgctctatcaacaggccaacatcggaaggatgctagtaaaaatgatgctgatcactgaagaagcattctttgtgctttctaacgttgctgatagctctgaacaccaatatttgttcgcacttatgacgatctgagtagaacgagctgatacaaaaacggacaacatatcttgtgcactcggattgagaagtgtgcgtgaatntttaagctcaactgcttgaaac

SEQ ID NO: 36773 - DNA, 151 bp, Glycine max
  unsure at all n locations
ttccactgtaacggaggtgcgaagtttgtaatgattgtcatgtggtgatcacacgcatttanatgtctagttatacatgtttggaagattctacataagatgataaataataatatttgttagttttgtatttatatgagtcataataatt

SEQ ID NO: 36774 - DNA, 213 bp, Glycine max
attctgaatgcttatgtgatactggatgaattgcttatacttttaacacttataacttgttatttattattttataattattatttataggttctagatcaattgaagaatcaacgtctactgatgagattgaatccgatgatgaaggtatattcacttttagtgggtctaaattttcttaatatcattatacatatctaattttcaaatttt

SEQ ID NO: 36775 - DNA, 449 bp, Glycine max
agaagaaatcacatgtgtgtcatcatcaaatatgtggagaatgtgaatgtatgcatacatgattgtgatgatgccaaagaagaaccaaacaaggctgcttcaaatgataagcatttgcttcaagaataattcaagattgcttcaacaaacaaagccttatttcaagattcactaaagaccaagccttgccttataacaaagtgctttcaagacatggaaggctctggtaatcgattaccaggaagtgtaatcgattaccacaagacagggttgagaaatagctgttgaaaaaggttttgaatttgaattttcaacatgtaatccattaccatatgtctgtaatcgattaccagcaacggaactttggaaattcaaatcaaaagtataacccttcaattatactgtgtatcgatacacaacattgaatcgataccagtggaagtttcaaa

SEQ ID NO: 36776 - DNA, 455 bp, Glycine max
  unsure at all n locations
acacataactcggntgtttgatattggatattacacttgtctatatgactcanacaacaaagacactgggagtagagaattacataccctgcagaacagcaagaatattaataattacactagccactgtgaaaatttcatggcaactaatttagtaactacttaaagcagaaaagcaagaatattaataatcttacctcaatgccccctccaagaccttcaaatacatttttcagatttctagatgcatcccagacttgaacaattccatggaagcaccctgatgcaagaaactgtccatcataattaaaatctanacttgatacaaaatctttatgacctacacaaaatcaatgacaaactcacgatggaaattcaatcaattgaaagtaacatgacattaccaatcatgatgntgaacctatctattagaaaatacacatccagtatagcta

SEQ ID NO: 36777 - DNA, 334 bp, Glycine max
  unsure at all n locations
tagcaatattgaagccgttgtataggtttgctgccagcgctgtcctcatcagaccattcaatgcctcagctactatattgaataaaaatggagctagagggtccccttgtctaagacccctttgaggcttgaactcctttgtggggctaccgttgactaaaactganattgaggctgatttcagacacccttccatccagctgatccatttaggacaaaatcctgttcttttcagcatataccagaaacaaattcatgataccgagtcataagccctttcataatcaactttgaatatgaggcagggttatggctcctcttagcttcatcaatg

SEQ ID NO: 36778 - DNA, 305 bp, Glycine max
  unsure at all n locations
catactcacattngagtcacgctgaggcggggaaatacccgagtggttacccgtataaacattcttcttgctatctgtaagacgaaaagcctgatagcatgcgaagactgacatcgtcttctgcgcccttcgtcaatcgcggccgacaagcccattgacacgcggagatttacgtcatcttcggcgctcacaagatctgtcatactgacattngagtcacgctgacgggcggagatacccgagtgggtatccgtataaacattcttttttgctgcttgaagacgaaagcctgaagcatgcgaaac

SEQ ID NO: 36779 - DNA, 279 bp, Glycine max
cactacaagccttaagtgaacaaccatgatatcaccatatccttaaggaattttggagctttgaaattgttttgggaataagtgagggggtttttgtttcattgaataacatgtattgttggccatgcttcatgatatattttgagccatacttgatgtacattgcatattggtgaaatgttggacatgctgaatatgatgttgttactcaaaagctaagccatacttgatgttcattgcatattggataaatgttggacatgctgaatatgatgttgt

SEQ ID NO: 36780 - DNA, 220 bp, Glycine max
  unsure at all n locations
cattccgagctngccttactggtgtgcttgttgacttgatataccagccacctcataatattgatctttttatatgaaacatggatagtatccatttaattttccttgattttaagactacgatagactcatgttcatatataatatgaaacataaaagctccaatggaaaacagtcacgttcttgattagtatattaaacaatgaagtctatcataatg

SEQ ID NO: 36781 - DNA, 337 bp, Glycine max
  unsure at all n locations
tgaagcccaatttggattacactngtttttatcgtccactcaggaatgacctttatggtgttatggttcatgggaacccctcgatcacaatttaaaaaattaagacaagtatagcaatagaacataccttgttctgtattttcatgttgattattcctaccaaacagtatgacaaacctatggtgtcccatatgagtgcctaagtttgtattgaaactaataaataagaacaaacttacctaatgagtccctatgtacacaaatcatgaagatgctgggtgcacgagtgattttcaatagagtgttgcaccacccataacatttattacatcaccta

SEQ ID NO: 36782 - DNA, 125 bp, Glycine max
atggaatacttacttgttggtgatgaataaaagccgccgatacggaatcaaaaaatgcaaaacatagtgatcctatggttgcaaactcctcaatcccgtggctattgcttttgaatgtggggggg

SEQ ID NO: 36783 - DNA, 306 bp, Glycine max
gggagcacgaaattgaaggaggataatgggagagaagttgaactttgagctgtgtctcacaaaactctcattcatcaaagttacaacaagtgttacacatgtttctatatatagactaggtagctgtcttgagaagctttcttgagaatacttccttgtgaagcttctttgagataacttccttgagaagctaaagtttatctacacacacccctctcataactaagctcacctccttgagaagcttccttaaataagatccctatcgacgctaaagcttagttacccacacctctctaatatcta

SEQ ID NO: 36784 - DNA, 224 bp, Glycine max
  unsure at all n locations
cctctatgacctagaagacgagggacctattcaggtgagggtcagcggtcatctgatcaaatntgatgaagatactttgaacactnttctgaagaccccagtgattctggaagagggggaaaatctttgtgcttattcccggtttgcactcctgaggcttgatcctcacgagttggctgctaatctttgcatcccagggaggggatattagctaaatgttgatg

SEQ ID NO: 36785 - DNA, 99 bp, Glycine max
tatgactcaaacaacagggacacttagagtagagaattacataccctgcagaacagcaagaatattaataattacactagccactgtgaatatttcatg

SEQ ID NO: 36786 - DNA, 242 bp, Glycine max
  unsure at all n locations
attcctgataattcggattctgagactgtcctcaaactatctacaaattctctgcatgggacctgagaggttgtctaatanaagttgctgctctgaactacctttcatattgacaggcagaaagaattccaatatgtaatcatcatcattagtataagtactccttagcctaattgcaactgcagcattcaaattatactttgcgtgcatgatggacaagtgggtattcactaatatcatat

SEQ ID NO: 36787 - DNA, 376 bp, Glycine max
  unsure at all n locations
ctggatgcattggttaactaggtaacccagctgttcttgaaccanaaatctgtacctgtcgcaagggtctgtagtttgtgctcctctgctgaccaccatacagacctttgcccttccatgcaacaacctggagcaattgagcagcccgaagcttatgctgcaaatatttacaatagacctcctcaacctcagcagcaaaatcaaccacagcagaacaattatgacctctccagcaacagatacaaccctggatggaggaatcaccctaatctcagatggtctagccctcagcaacaacaatagcagcctgctcctttctatccaaatgttgttggcccaagcagaccgtacattcctccaccantccaacaacagc

SEQ ID NO: 36788 - DNA, 313 bp, Glycine max
ataagctaaacgcttgtcaaaggtcggagagaagtttgtccgaccaattgagcaagatggaagaaaacatgggggccatcattgaccaatacaaggaaaaactaagtctagcagcaacccatgaacaaaagctagaaaatgagtatgcaaaggtatcggtcctgtaagccgaaagggaagcgagagaaagagtgattgattcattacacaaagaagcaataatgtggatggataggttcgccttcaccttaaatgggagtcaagagcttccaagactgctagccgaagctaaagcaatggcagacgtgtactc

SEQ ID NO: 36789 - DNA, 176 bp, Glycine max
cttgactcaataattctagtgctatgagtaggacagtaaaaattatactcctgtaatcattcagcataaccaatgagatatgcactaacggtccttgggtcaacatcttctcatgcgattataaacttaacttccaagaccgcccacctcgcaaatgttcatacttgctcccccct

SEQ ID NO: 36790 - DNA, 307 bp, Glycine max
  unsure at all n locations
tctgaactggcatcgctgttatatgtcagtgatacctctaacacttggaacaaaatgaatttctctttttttggatgaattgtttctattatctcatttgattaaataatttagagaatattattattgactataataaaataactgaaacaataatcagaaatatcatgcgcttctatataaacataaaactgactacctactatttctactatttaagacaatctctgaatatgacttaaaacctancaaaagttatgaagtgtgactatgaattctagattgatcttatcggatttattcaaat

SEQ ID NO: 36791 - DNA, 277 bp, Glycine max
actgatggactcgtaccaccaccacctactcagccataatcaacaggaagaaaatgtgcaacataataataaagtttaggacctcacacactctactcacgtttttagatggagtacactcgtgtttaatgctctcatacgcttatgagaatgtatccctcttgcctttaccactcgtgttactttaagtcctgatggaccaatagacacacagatattaaataacgaagacatatgatgaccaacgattgattggatacacttgactgatcggtat

SEQ ID NO: 36792 - DNA, 306 bp, Glycine max
cggaccgctagacaaggggtgaagtctacttattacgtgtcaggcgtccaaatggaagatcgaactagcacaatcagcccacaatcctgcttgtagcggttgctccctcatacgcagtcatgcatatcaaaaccgttgttagattccttctggatagagattatcacaatgctgtcaggagaattactctattttagctctgtaataatcaagcacgaaaaaataatatttgcttttaccttggatgtaccccttctttcttcatttgaggccgtgcctcatacccacttgattcttactatacat

SEQ ID NO: 36793 - DNA, 191 bp, Glycine max
actcggatgtccgattcatgcgcatgagatatcgattctcttgtatttgaataacacaagctctcgagagattggaatggtcataactcttcacaccgatgtccgaatcgggcgcataatatgtctagacgctctaaattgatcaacggaagctctcgataaattataatgggcataacttttcactcgga

SEQ ID NO: 36794 - DNA, 508 bp, Glycine max
  unsure at all n locations
gaggttgccttttgagactgcaccnattagtganannntccggccggncgaaaatnnactattatgaggtggagatgtgcttttattactaatattttacgcagagggtattctgaataatagaaccatactcctcatcctcgatgactggacccttgatctacgaattagtaagaggagaaaatacatttcatgactccctgtcaaattcattgtgtgtaaaaatttagcttgtccntctctgtatataacactggataatatacatttcgtggaactatgaagaaaggatttttaaatgtcaattgaatactatatatacgatggttaatattctactttgtttcatacacttggttaaccaattaaccaagtcttggtagtaggagaattggacatctcttaataataatcttaaatgaatctagtgagattggtcatttacttcgcgctgacgttttaatagatctcttatcaaagttaccatcttctaggaaaaattaattcc

SEQ ID NO: 36795 - DNA, 371 bp, Glycine max
  unsure at all n locations
ttctccncaatttctataatagggggagaagtgaagtatatttggtttcagcccctttggcacttctctgtctttcgaatctgcttaggaaaattgtttccgtgaagaaaatccaagccgaggtgcttccgtaacccttccgagatgtttccgtaagcaaatccgtgaaggtttgcgtccgttctttaccgttcttcatccgctcttcgttcttcaacgggtaagttttcgaatccgagactatcaatttatttcttgttttttaagctttcatctttatttcgttcattttttatatctttgtctacgtctttaacgcgctcttaccgtttatttaagccgtttctcccctatacatgattaatgatttc

SEQ ID NO: 36796 - DNA, 319 bp, Glycine max
tgcaagtcataaatgagggcggacgaataaaatagcacaatatcattcaaaaaaaatgtacaaagactcgtataacattatccagataaaacattaaaagaacaaatgagtagaaatcttttctgcatagccaaagaaaatctcatagtatattcggacatttaaccaaacacgtagctgtcaacccgcaaagtagtacaaaataaaatcaaatagatatttagctatttctccgtaacccatcaatacagccacaccaaaatctatagaacaatgaaaaataataagatcatatgaatgaaacatttaaagaaaaata

SEQ ID NO: 36797 - DNA, 199 bp, Glycine max
  unsure at all n locations
accgagaagctatataatagcaccaaggttttagtttctggagtttttcgttgagaggggagaataattntatgttttgcaattccagttcttactgttcatgcatacaattcacgtagcaataaaattcgttttctgcttcaatntgcaattttgtttttgcttcaatctacaatttcattttctactgattaatgga

SEQ ID NO: 36798 - DNA, 206 bp, Glycine max
tgatgacagctttccatcatctgctatacagtgattagatgaacgccaccatacttgctctgcactgttcataatgggatccatccagaacaggaggtctgttcactgtgcctccttctttctccatgtgcatcagaaccaacctacctagatctcactcagtgatttcgagcgaccgctctgataccaagtgaaattctgatact

SEQ ID NO: 36799 - DNA, 128 bp, Glycine max
tctactcgtctcttctgctaaatcaatataaatattaacttctacataaaatagtacaattattcaatgctagtactatatcattatttgatatgtttctttctttttcactacaaatataatttaat

SEQ ID NO: 36800 - DNA, 410 bp, Glycine max
  unsure at all n locations
cgacaataactatgtactcggatgtctgattgagtcccgaaatatatcgagacgctcgagatggaataccgaagctctgagcaaattcaaacgacaataactntntactcggatgtctgattgagtcccgtaatatatcgaaaagctcgaatgtgaatgtagaagctctgagcaaattcaaacgacaataactttttactcggatgtctgattgagtcccgtaatatatcgagacgctcgaaatggaataccgaagctctgagcaaattcanactacaataactttttactcggatgtccgattgagtcccgtaatatattcgagacgctcgaaattgaatgtcgaagctctgagcaaattctaacgacaataacttnttactcggatgtctgattgagtcccgaatata

SEQ ID NO: 36801 - DNA, 349 bp, Glycine max
  unsure at all n locations
gagcgtctcgagtagtacggactctattatattccgagtaaaaattaattgtcgggtgggattgtctcaaagattcaacattcaatttcgagcgtctccatatattacgggactcattcagacatccgagtaaaaagttattgtagtttgaattatcttagagcttcaacattcaatntcgagtgtctcgttatatcacgagactcaatcagacatccgagtaaaaagtaattgtcgattgaattggctcagagcttacacattcaattgtgagcgtctcaatatattacgggcctcaatcagacatctgagtaaaaagttattgtcgtttgaattggctcagagcttc

SEQ ID NO: 36802 - DNA, 251 bp, Glycine max
tagtcaaaacgaacaaagtgatgtggcgctgtctatatatttggacaaacaaaacttgagcaaatagagtgaaccttacctctgctaagttaacaagtttccatcgtattcaagcttattgtgtaaacactctttgagtgattagaatacatattctatcaaacatttattatttgtgaaagccaagagtggctttgcgaaataaaatacttaggtattaatctcaggggaaataacggtagtgacaaaag

SEQ ID NO: 36803 - DNA, 381 bp, Glycine max
aacgaccacgacttaatccaacaacattgatgccatagtattttgcgaaccccagcttacattcgacgtgctggaacattgcacaactacacgcttgacacagtgcttgtacagagctcatctccacccgcagcacaaaacaaattagttggaaaaatgaagataaactgtgttaagctagacctataaacgtacaagaagatactgtcagtttgtttcactaactaaatcaaataacatgtttttgtagcttatatatatcattaagaaaccagtacgacagtacctgaaggaagtgaattgtcttttaatcgagtcagaaaccagtatatatcatttaagatatgtaagtgagtggtgtcttttcagacgaatgaagca

SEQ ID NO: 36804 - DNA, 191 bp, Glycine max
agaggttcctccgaagcggagtggaggcttcttcacactccagacatcttctcacagagcgggtcggtcagatcatggataactcgctcgtgaagttgcaaaccatatttcgagaagatccaacggttaatgaaggctgggcagcatttttaccgaggcagcttcatgtagctctctctagaagcttcatt

SEQ ID NO: 36805 - DNA, 251 bp, Glycine max
tgcaacacttatatgacgtggtcgcagcttttctcttctatagaataattatgaccttggcggcagtagatacaatccaggttggaggaatcatccaaatctgagatagacaagtcctccacaacaacatcagcctgtccctcctttccaaaatgctactggtccaagcaagccatatgttcctcctccaatgcaacaacaacagtagcagtcacaacatagacaacaagcaactgaggctcctcctcaac

SEQ ID NO: 36806 - DNA, 529 bp, Glycine max
  unsure at all n locations
agagggtttgatacgatacgactcgcannnnctcttnngnttagacnacncaaccttgtagaaccctaacgagaggagtgcgtacgcagattctctngttttgtccgctcggagtaaactggggagaaggatatgtttgttactgtcccgactattctactccacaccatagataacacctgtatacgatgtcccgacagtggctgtgagaggcgagatgcagaattaacctaaacatggttacatctttgaagatgcgtgtagatggcttgacttctcaataacaagatccatttgtttgaagaatgattattattttataaatgtagcaccactatatctattatgtggcgatgcacctattaacgattgaggtggcctgtatatgtgaaatttatatccatgcatgatgtctatcacatttggaacaaggcgctatgtgaaacaataagatattcttggtctcggataggaggaacaataatcgtatttattattattgtgcacacctctggccatgccaacgccg

SEQ ID NO: 36807 - DNA, 235 bp, Glycine max
  unsure at all n locations
catgtnttggttgattaccataggattatggtctatcagtatttgtaatttaaaaacacacttagaggtaatttagtttcatacaatcaanacaggaaccagtgctcgacagatattatgtttttggcagaatctgagctttaaagtgttacaaacaagttataacatcactataatttgaaattaagttaaagtntaatgtattaacctatggaacatcaaaagagagtatttt

SEQ ID NO: 36808 - DNA, 216 bp, Glycine max
ccttctttagtggacgtagtggtggaagagacttccttactccaccctactcttcctccaccatgacttagggagtttttcttttcctatctccttctttgctgttattacactggtctgattctctttgatgatttaattgtctttaatcttttaattgtgctacattgaggacaatgtgttgtttaagtatggggggagggggggggctctctc

SEQ ID NO: 36809 - DNA, 342 bp, Glycine max
  unsure at all n locations
cttggcttcatgaacactgatgtgtgatacattgttggtggcggcggcagaggtggtggaggacaagatttgtagaagcccttcttcctcaccgaatcctctgcgtttgaagacaacattataacataagtgttngaagacaacattataacttcagcttttctattggaattgcttgaaaatccttgagaaattggtgacctatttagagattgaacatctgtatcaacaccatcagcttcaacttctgcatttctattttaattgcttgaacaccttttgaaggttgtgacctatntagatattgaacatcaacatcaacatcaacagctttaactttct

SEQ ID NO: 36810 - DNA, 256 bp, Glycine max
  unsure at all n locations
gagtatatctganccantaaaaaccccgnannagagggaaattttttcatgaaatagggcgtgaaaatccacccctaaaacatggcttatagagcgttggtcttatctataatggtgagtaaaaaatacggctcaggttttaaccatggacattgcagcgactttattcattaatatttttagactttatgaaaaaaacttggcgttacaattggattaaaactccaaagaatttggcgaaactccccaaaatacc

SEQ ID NO: 36811 - DNA, 282 bp, Glycine max
  unsure at all n locations
tctagtaggaattatggtggttgagtggcaccaaactcatgatgacttttgcatatcatccgcaatcggatggccaaactaaagttgctaatcatattgttgatcagtacttaggtgcttttgtccatataagaccatcagcttgngggtgtttcctattatgggaagaatggtcctacaatacatccctctattcagctacaagaatatctccattcgaaatcaccttcagcaggaagccacctaattttcctcagtatatagtatgtacctctaaaattg

SEQ ID NO: 36812 - DNA, 241 bp, Glycine max
aactaatggcgtgcttggaattgccttcgaatgccaatccaataaaagaaggattggtgttcaacatgcattggaatggaagaatgctccagagcaaacccacactaaggagtgacataaggacgatggttaaagaacatgtaatgcaccttattaaatgtttctagtaatctataacagcttgtattgaatgtttcttataaatattttctctttcgatacaaattttctaacttttgtc

SEQ ID NO: 36813 - DNA, 392 bp, Glycine max
gcccaacgctgtgttcatactctgccagaacctattatgttaatttatgatctctatcagacactatgctagatggcacaccatgtaatctgacaatctcactaatgcacagggaggtcaacttctctaaggaaagcctaatattgatggggataaagtgtgcgaatttggtcaatctttcaacaaacacccaaatagaatcaaaacctttgtggtcctgggtagtcctacaacgaaatccatggagatactatcccacttccacttgggtatctctaaaggttgtaacttacttgaaggtttgtgatattctatcttagccttttggtagactagacacgcatacacaaacttgctacctctctcttatgttgggccccaaaacattacct

SEQ ID NO: 36814 - DNA, 324 bp, Glycine max
ctatacatggattctggtattgtgccattctatttattatgatagatgtcaaggtttgtcgagttatggtactcaagtatgaaactaggcaatccgccagtgaagacattgagatctaaagcaagatgagttaaggcaaggcattccagaaacatattcttacatgcgaatccaactacgaattagttcagccaggttttgttgatattaggcatagaggttaatgtaaatataggaaaaatataactatatggtgtggtccacgtacgctgtggtatgtaatgattataattgaattccttgttgtttaaaccaccataatga

SEQ ID NO: 36815 - DNA, 371 bp, Glycine max
  unsure at all n locations
gatgtngaccacaatcgtgtgggggatagtgatgactaagatgatgtcggacttgaagatgaggaggatgtggattctgaggtacacaccgacaattatcgagattatgatgatttttggattccaggtttctttaaagaggaatgtataactatcgataccatagttgatattagacagcttgacatggaaaaaattaccgttgaagatgtaagcaagttagattnttgtgactnggagatagcttatcttttctactgttggtatgcttaaattactggctttctgttaggaagagtcatattcttagaaacacatgtagggaaacactgcaacannacattgtttgttatgtgctgttatngagagat

SEQ ID NO: 36816 - DNA, 374 bp, Glycine max
  unsure at all n locations
atccgatcatggaaggacttggcaactgccttcattatgcattaccagtacaatacagatatggcggccgatcagaaccagcttcagagtatgactaagcgagagcatgagtccattaatgaatatgcccaaagatggagagatctcgcagcccaagtcgtaccgcccatgacggagagggagatgatcacaattatggtagatacgttacccatgttctactatgaaaagctgataggctacatgccagctaactttgcggatctcgtcttcgccggagaaaggattgaatccggactacgaaaaggcaagttcgaatatgcttccaatggtggccccaacaacaacanaagagccccagtagtgggcgcgag

SEQ ID NO: 36817 - DNA, 190 bp, Glycine max
ttattcaaccactctccatccttatatttcacatcaaaattgtcaccaagtctgacagtgtgcatcaaacgaagattcccaacctgtaaagggagtgttcccgacaatgaattctcaccaagatcaagatacctcaactgtgagagaattccaagttcataaaggagtcccccatccagataattatcac

SEQ ID NO: 36818 - DNA, 499 bp, Glycine max
  unsure at all n locations
ngattactgaactagacatttctannntctcgcaattagacaacngaacctaggtnncggctgtgtatgcatatggcgtggctttatcttatctcggctagacnacatactnatggaggctgcgattgttattatataaaccttctctcttgatcttgaatctatatttacttgatcttgtcagtttgagggcttctctgtgatataagttgcaaactcttcttgtttaagtatatgagcgcattaaagaccctgtctaactcaaggtaacttcggaagtccaatacaatcgatgcagtttaagcccctgcatctctggtcatgcggcaccttatttatttactctacttcaaccacttattgccatgtaatgaccctttatttcaaaattggaacctaaaagctactggactgccaataaagtacccctcggataagtagaacctcatatgctatctaaataggtaagcgagggccattgattacaatcgctttgtct

SEQ ID NO: 36819 - DNA, 198 bp, Glycine max
gatctaacaaactcggcttaatgttcatgagaatgtttattgtcgatagtattaaaacaactctgcataagaccgataatgctaaagagtttatgagattagtgggaaagcactctcaaatagcttataagtctcttgctaggacattaatgagtacattaaccaccatgaagtttgatggttcatgtactatgcatg

SEQ ID NO: 36820 - DNA, 333 bp, Glycine max
tacaacttcaggtgaagtgtgtgaggaagatggaaccacacggacattttggtctgaatcttctagaggacaaggagaaggaataggaagaacttcctggagagacaatgaatggtctacggagggtgaaaagaagggtgtgtcttcaaagaaggttacatctgctgacatgtagtatcgtctcatggttggagaataacatttgtaacctttttgaagacgagaataacccaagactgacctagcagagagtttgtctataccaagagacaaatcattgacaaaacatgtacaaccatacactttatgagagacatgatatagtggatcatg

SEQ ID NO: 36821 - DNA, 283 bp, Glycine max
  unsure at all n locations
gtgttgagggtgaaacttcctgctttatttgtgaccacagagtggtacctgnagatatgtgcgcggggtcaagagaccattgggacgtcaggtggggtgctattgcccaaaaccaagcttgaccaatcccgacccaacccgggcatagtcggtcagtgagaacctgtgatgtacctaaacaggcgagctcctgacagtcaacagataataggaacaaagaccacatagcaaggatgcttgtggtggcttgccanctgtgaaatttgtgtgatatgtggattat

SEQ ID NO: 36822 - DNA, 246 bp, Glycine max
  unsure at all n locations
gctactgactctaccaaagctgttctccaaaggagtntggcaattgtggaggagaacaaactgtggaaccaagaggtggtgcaaaaggttgtgtccttagaggtggaggtcgccaagtagagggctactgctcagactttatgacgagtggagtgccttaaggtggctaatgccattgatgcttttgttgaagccgtanaagtgaaccactaactgtagttgcgcactctgttagatggtgatgac

SEQ ID NO: 36823 - DNA, 310 bp, Glycine max
  unsure at all n locations
atacgcactcttacagagtatatgtggnttcattcatagtaaatgctnttatttaccaacgatccaagggttcatatactctctttgcttttttaattttgatatgaatatccttcgatatgtcccctgaattcctacaatcacaatcactaattgatttaccttctgtgtcattctctttcagtgcatgttgtggtctagccttcgatccactttctttagagcttgctaatatcgagcaaccaatattggctagacaaactagtttctcatgacaaatatcctatcatggaccatattacttgcataa

SEQ ID NO: 36824 - DNA, 181 bp, Glycine max
atctaatgttgcattctttgattgctcgaatacattgtgctttttcatcgaaggtcatgccaaccttaagtgcaccagttggaggttgaacacggtcttgttgctgaacgaaatggtggcgatcaatgtattgtggtagatggtcgaggttcaattccactcgatgcctaggttgatgata

SEQ ID NO: 36825 - DNA, 178 bp, Glycine max
aatacattcctcaccaaataaatgcatttaaaaccatttaccaattagcctatctgcccaagacacccaatgccaatttttatttgatttaggacggccaaggtattgctactcactagaatattgaacttatctccaatgatgaaatatgttgacacaaggaacccagaaaaaaggg

SEQ ID NO: 36826 - DNA, 280 bp, Glycine max
  unsure at all n locations
cgaggtacttacccgttgaagatcgaagaacgatgtttatctaatgaagaacgtcgaagaacggttgagacctttgcgagattcctcacggaaaacgttacgaaaacgtttcggaagcgcctcggcttagattttcttcacggaaacaatntttccaagcaaattcgaaagagagagaagtgcctaaggggctgggaccctntcttcttatttcctcccctatttatagcaaaataggggaggtggttgccgcccagctcgcccaggcgagctcagctcg

SEQ ID NO: 36827 - DNA, 340 bp, Glycine max
  unsure at all n locations
agtgattgtgtgcaaccatagattgtacattgagtatcctctttgatatgttctatagttgattctgcgtgaatttctaattatcataacatatgattcatggatatgatttatgcattctttctttctttacattgtaagccactgaccaaaaagatatctcgatgtatattgttttatcatttgcaaagccctatgagccaaacacttcatattttgttggaacactaacctatgataaaagtttcctaccttaccttagttaggaagacaaagagtgtntgttggggaattctatcatttgggggctaatgtgattaaatactctatttttaaatgt

SEQ ID NO: 36828 - DNA, 515 bp, Glycine max
  unsure at all n locations
agatttcatcncatganatngcgcnacatnttagantacncnaccncanganacgcagatcacactatgtgggtggagcgcttttttatttttgtttntctcnccaccgaccgcgcgggagtgttgctagaaaaacactacaccacaaaacaacgtacttaacactcacatctaacacagaagattgtggctccattattcctatcatcacaatactggtatgtagaaaataatctgtatgtcaactaactctatgatgccattgtctccacctaaagctcatcttcactatcatattcaatggctatggtcacatccaaagagaggctagaactctcttcattcacagcgatctctttcactttgatttcacacatggcgattatctcaggcttgggaacagaaactatttcaattgataagacatgaccttcttgagaggaaccatccccactgggaggcccgcctcccttaaattcgtcgctacacgctttgagagagaatcccttgtccag

SEQ ID NO: 36829 - DNA, 178 bp, Glycine max
  unsure at all n locations
agatcgccggttagacactcacctcttcttattttttatgngggagatttgntggatgggtgtgggcttacttcctgtgtggagtaaaggcccaaatgagaaggtccgatccatcttgtctcacttatataagtggagagggattatattatgagagagagagagagacttatttgtg

SEQ ID NO: 36830 - DNA, 230 bp, Glycine max
  unsure at all n locations
tgagattaanaatgaagatgtcagcttaatgattataccgttttgctaaagttgtagaattgacagcaacggaacatgaaatttgggtaattgaagttagctaaaaagtttccgtgtgttataccaatttttatttatttatttatgggtgcccctacctgtcataatttcttgattaactgcaagatactacttcaagtcttaaccattcggttaaatttaacattact

SEQ ID NO: 36831 - DNA, 192 bp, Glycine max
  unsure at all n locations
tgtaggtgacagtgacaacgattgggttggagattattatgtttgtaaaagtactgatggatttgtgtttttcatggggaatatgtgaatgtatgtatacatgattttgatgatgtcaaaagaagaatcaaaccaggctcattngattcaagattaatacaagattngtttcacanataaagccttgattca

SEQ ID NO: 36832 - DNA, 351 bp, Glycine max
  unsure at all n locations
cttctttctccttggggaactggttcctcggatgattcttccagcttgagccctgtgtgaaattcctcccttggttgaatcccgacggtcctccttggttgtagcattggaatccgtggcgattctgagatcccatgtagttcacctccctggaagaatcttcttgggctatgcattgccttggctcatctgctccatcgtagatgtggcatccncctattcgcatgattgaagagtgagaaggacttactgcttgtagttgttgagggagcttgctganggtttctgtgagggcctctatctgtcgggccaatagcttggtttggcccagtgttgcatcttggactgtga

SEQ ID NO: 36833 - DNA, 278 bp, Glycine max
  unsure at all n locations
ccgagtaaaagttatagtcgtgggaatttgctcagagcttcaacattcaatttcgagcatctcgctatattacgggactcaatcagacatccgagtaaaaagtttgttgtttgaattggctgagagcctcaacattcaatttcgagcgtctcgatatattaagggactcaatcagacatccgagtaaaaagttattgtcgtttgaatttgctcagagcatcgacattgaattgcgagcgtctcgatatattacnggactcaatcagacatccgagtaa

SEQ ID NO: 36834 - DNA, 362 bp, Glycine max
  unsure at all n locations
gaggtccagagactctacaagatgtgcagccttttttgatttaaccttttgctgacccagtaatacactagctntaactcgctattcatttgagctaattgtcttcatcatgtttcctttaggttgagataacctaaaccttttgatttcatattattttatggttatgcaggatattatacgactgccaatgctatttatctntcttcataagccattggcccaatttcgatctgttttaaaagccctaagagcacaaaggcttgcttcaatcggtggtggatctctttagaatataactgaacacatgcactgcctctccaaaacttatttgcatacatcactacagacatatatttcac

SEQ ID NO: 36835 - DNA, 274 bp, Glycine max
acgtacctaagcaggcgagctcctggcagtcaacagataaaaggaaaacaagaccacagagcaaggaggcttgtggtggctggccagctgtgaattttgtgtaatatgtggattgtggcctctggtaatcgattaccaagggtgggtaatcgattacaaggcttaaaattgaagacagggggctaagatggtctctggtaatcgattaccaaggggtgtaatcgattaccaggcttgaaaacgaggtcaggaagctagggaagcctctggtaat

SEQ ID NO: 36836 - DNA, 195 bp, Glycine max
tgccttttagcctctgaggcagtcgtggagcagattcctcgtctcttgccgacctgtctcaacaaggcaggcatgttttattggtttggattttgaatctctcttggacattttatagagaacttggtgatttgcttgctataataacttacatcggtcattgctgggtttttttttgtaattcccggtcacatt

SEQ ID NO: 36837 - DNA, 1349 bp, Glycine max
  unsure at all n locations
nggggaatgggacctttactntnnngcatttgcntatnnnnncgntgncnnancnnancnattgganntgacanncacnangnanccgnnnngncganngcgctannntngaannntnannggcangtncacccccctcttacgatcaatagtaggntcgnngaccngcaattttnaagatanncantgcntnnntcatgnacngangnnnnnacaacgccanaacngccccnannncgggcgancggannagntangtatangtnatcnaagcgaatgntacnnatctttcntccccatcngctngcnacgtcgtnncccancnannanctnanngnnannannacncntngnaaccccatttcgaaaccctaganggaccnacntngcantaatanngantggggtngcctcaantgccccanctattaananattaaaactananntncntcctttagtctcgcccttcagggtaggagtagtnctttcgaactantncnngtaaagtncancnagntcgaaccaagcatagtactacctantntgtactcagacgnttntcnatctnntgggtgntcggcangtgngcnantnngtagcanntactcccgtangctcttcntaagtnncnaccctaacntacagcaaaatanngcccgcnagcannaccancgacnatttcggggtanaccnatngcnggaacntcntcggngcatcgtttggatnggagggatngcntagtcntctgcaaaaaaccangcatncgcntccctancnaccccancgntantancacctaatggggtcgatcaacggtcagttttanttttagctncccagtactagtccantagtctacccanttcgacgtgcagttgaaactcctaatcatggtactcggggatcgtcaagtcaatangcnnccaanttannatcnanccnnantngatnngtcagtggtngaaagctnncaagannacccgncgccctcatcagtcnttcntnttaagcttgaaaagtagtatctnnatccccantnatncgacngtcntgngannggggtgntaaacgaagccgtnntcgngccanaaaactganctcaaaatanttacnatnttgtaaaaccccatctactgctgtnctcttncaagctgcacngaccanncangcagttactcattcatttgctttagttgctanngagcttcgaannagtcngcacngacntgggtctaantantcgtcnctgacaccctccaaaaanatgagtanctgccantantggaccgcanaccgtnnagantcntnantcgttnacttataataggggtnagngacnacgcgn

SEQ ID NO: 36838 - DNA, 365 bp, Glycine max
  unsure at all n locations
tcgggttgatgaggaaggatatattgtangggtatttatgtacgggtgaggatgatcctcaatagcatcatatggttgtgactcacaaaattggtgaagaatggtgcaganagaagccccactacttatgggtatcaaaatgaaatattgcatggtccaatggttgaggacacagacgttggtggattnttgttttcaaggcctcaagtgtgaggccttgctttgtttcaaagaacaatgagttggggctttcaaaagtatccccttcatctactgtgattatttcaccatcgtagtgcattaaccatttgatagatgaggaagacatattgtgntatagacaaagaatagagaaacaaatgtga

SEQ ID NO: 36839 - DNA, 340 bp, Glycine max
  unsure at all n locations
aagctgaaccattntatcaatagacacaagtagtgngntattcaganaattagagtatatcgcggttatcttagtgagagtgattctcctaaattcttgagtgattcaagaacaccctggctgtatcaaaggactttcacaacctttgtgtgttgccctcgctggaaagagtgattctttccttcctatcatctccacccttgttctttcaaacaacatttccagataatcacctctgcccaaattatctcgtgaccataactcccatttacacactcaaattaagtgattcttgatcctaaattgaatttcaaacgagatctttcacctcgttttggaa

SEQ ID NO: 36840 - DNA, 351 bp, Glycine max
gatgcacacacctgtgagcaagcgacgaagccttttatcttctaacctgtgcgaacgaagagcgggagagctccacaaacacggcgagctaccaagagacctccatgtcttacaaggtgacgacaagctagctcgatctcgataactcagacatgacaatagctgaattactgtatcatcaggcaaacacttccaatcaacaaccccttgcctttgagttgccaaatccaaaacctcatcttgaacttcagggagactagactgcaccacattccctatgctatgtctcgccagctttcgtctcactctatgatccatgtctcaacaaaatcacagcatacccacaccaac

SEQ ID NO: 36841 - DNA, 173 bp, Glycine max
  unsure at all n locations
tggtcctaacttttaactcgtaggtctgattgaggcggataatatatcgacacgctccatattgaacaatggaagctcttgagcaattcanatggtcataaatagtcactcggaggtccgattcaggcgcataatttatcgagacgctcgaaattgaacaacggaagctctca

SEQ ID NO: 36842 - DNA, 188 bp, Glycine max
  unsure at all n locations
gattgnngggaataaaattgtgctacgttctaattcagaattattatagaatcaaggtggagattgttggaaggagtgaacgacactgatagaggtaactgaatgacactatttgtatcgtccagtctagcccttagtgtagaatctatctcttgtcagtggtgcatctagtctattctatgtaacat

SEQ ID NO: 36843 - DNA, 262 bp, Glycine max
  unsure at all n locations
actatgcagagaatatccaagagaaataccttcttcagatttatcatcaaattntcctaagtgatgtttggcattattcaatacaaaacatttacaaccaaagatataaagatgtgagatgtttggttttttgccattgaacaattcatatggagctttctttataatgggtcctattaaagccctatttaaatgtaacatgcagtggtaacagcttcaaccctggcataccctaatttcgtccggggacctttgcttgatg

SEQ ID NO: 36844 - DNA, 355 bp, Glycine max
  unsure at all n locations
cgtatgaacttgtatacgnacctttggtaaaacgccggcggagancnacgtagaatgcgggactttttctaaaccagaatctacagggggttttgtactcttaccccttcaccatgcaatgataggaatttctagatcatcatctacggaacaaactagccatacttatttgttcagtgaaaagggtaattgttctatgtcctgcggcgccaacttccaatggaagaaatcctctgccatttatgttgtattcattcagccgaaggccattcatccaatactttcttattctgggacttatgcatatttaagtggcgttgccctcagaaactcctttatgatgtgtatagctccc

SEQ ID NO: 36845 - DNA, 364 bp, Glycine max
  unsure at all n locations
aggtgactgancccaccttgtatagacgagcgnagagggnttataatgagaaactttatttagaaccccacacaagggggggttttacactttccactcctgagacatagggtagatgagtgtcttggctataacatttaaacatgggattgcccacgtccctacattggtctaaacaagaagcccccacaagccttgtgatagcttgggaccatagggcttgtatggacacccagggcatatggttgccgattatatttttggaaccctttttcaaaaaagctttaagtcccctttatccaggcgagaaccaatttattctacacccaatgggacttttggaattacactttgaacatttata

SEQ ID NO: 36846 - DNA, 320 bp, Glycine max
ccaagtaaaaattaatggcgggtgggattggctcaaagattcaacattcaatttcgagcgtctccatatattacgggactcattcagacatccgagtaaaaagttattgtagtttgaattagcttagagcttcaacaatcaatttcgagtgtctcgttatatcacgagactcaatcagacatccgagtaaaaagttattgtcgtttgaattggctcagagcttccacattcaatttcgagcgtgtcgatatattacgggcgtcaatcagacatccgagtaaaaagttattgtcgtttgaattcgctcagagcttcaacat

SEQ ID NO: 36847 - DNA, 240 bp, Glycine max
  unsure at all n locations
aagaaaagactaactacgggaatggaatgaaaaactatgtaagaatcttacagggaccagtcttgaaataaatgggaaaattccagataattatttttgcaagatcctaatntcacaattgaaagcaatgaccattcaacaacaaaataaaatatacatttcaataagtgaatagcaaaatgacaaaaatgaaaagttctattgtggcaacttacaagcttgtaattgcggcattgtagg

SEQ ID NO: 36848 - DNA, 462 bp, Glycine max
  unsure at all n locations
gggtaactganacccntttgtatacccgcgagtagatcacagaaaatactcgaacttgttctggaatnnggnatatttattggggttattggtcaacctattacctcctttgccangaagtccaatggagaatggatcctcccttagaattcaatccttcctttgggaattgaaccatgagggccgatacttaatctgtgtattatctagagatagggatcctatttgttcctctttgtttctgttggattgcccaatacttcccgatagggaaaaagatactccatttgtgctatatttatggtatgnttttatttgtgtggtgtctggaaatggcctatttcattcccaatcccgtttcttcaatctctgggggatttgattgatgagaattgcttatggggggcgtatttcctttccactgaaatgctacaactttactgcatgttgagattgatcttc

SEQ ID NO: 36849 - DNA, 300 bp, Glycine max
tcatccaaccttatatggtcgaatccttcacaacagcagcagcaacaataacaaccttatcttcaaaatgttgttggtccagcacacattacgttcctccactaatccaccaacaacaacagcaacagcccccgaaacaacaaactatagatgctcctccacaaccttcccttgaagaacttgtgaggcaaatgactatgacaaacatgcagcttcacaacagaccatagctgccattcagagcttgactaaattagatgggacaattggctacacacttaaatcaacagctggaccaaa

SEQ ID NO: 36850 - DNA, 346 bp, Glycine max
tatcccttaatggatggcgcggggggtcatcttctttcctttgccctccgctgcatctccatggcggaaaattaccattataggaccccattgaagctcaaagatccagcctccatagaagccccacaagcaagcctccatcaagtggtaatcacagcacaaaagcttcaagtaagtgctacttagacctgcattaatttttttgctttaccttctcttgcattgttgcacctccattgtttgtccatgtatctcctcacatgtcttgagctcaatgttgttaacatgattgtctacagataccaccaagtaaacttactatcgatgctagacttgattttttatg

SEQ ID NO: 36851 - DNA, 487 bp, Glycine max
  unsure at all n locations
aaggatggacngcttagcacgncannctgagatnaatacgctngcnggaggannaacanggaagaagatggggtggngattattgtgttgncgacacnaagcaaggtctgagagacgtgtgcaagtttcctacaacccctcactaggtgggccattaacgttatcatatgctgacgagttccgacaatcccgcgaatctctatctgggcggaatacgagaatgccacagctttggccttggctaacaatcggagaaattgtagagtcccattcaaaggaagagcaaaccgatccattcacatggtggcctcatggtgtaaagaatatatcgcgctttctctacactctattgctgcgtatacttaggaatactcaaccgagattctacgctagccgggcagggcaacaccctactgtcntgagtactaagcatgaatgctaactgttggtcttgtgccgtataacggtgagacaacgtttttggacg

SEQ ID NO: 36852 - DNA, 490 bp, Glycine max
  unsure at all n locations
agagctgagcctgtatagcaacatttataataagacccggccttancnnagaantataagagagagatgggttttttctttttttacagcacgaaccctggggcgaggtggatactaaaaaaaccacccccctacggggaatggaatgaaaaaactatgtancgattcttcacagggtaccacgttcttgaaataaatgtggaaaatatccctaaaggaaatctcttgacgattcctaacagtcccaattgaatagctatgacgccttccatctcaaacaaataacctctttctctctcattatggacccacctcgcgtacccgctcacaaatccaaatntagacttcgagttaacccgccaccactacacgcaagccactgtcgccaggcaaatctatgcgaagacctaccacccctttcgtaggttccacacactcctccccattattatttggtatcctctccatcccaatcttttctctctacccc

SEQ ID NO: 36853 - DNA, 187 bp, Glycine max
acctgaggggacttatagcctataccatacttcccacaatttccttagatatttatcaggcttgttatgccaacgatgccatttcctatacccatgccgggttcataactcgctcccaacatcactagggccatcattaccggcgcatgagacagacaacgctgcccaaagagggagtccagggatg

SEQ ID NO: 36854 - DNA, 307 bp, Glycine max
atgacaaaaagctcagaggtgggttcatgataatcaaacaatgagttccagatgtacaagatagaatcaagaacaccttctggttcaagaataacttttatttcatgaatcaagaatcaagatcatgattcacgaatctagagatgacttaatcatcattagtatgaacaagtgttttcaaaaactgagctgcacatggatttttctcatatcatgtttaccaaagagtggttactctctggtaatcgattaccacattgttgaaatcgattagcagtggcaaaatgtttttgaaaagttttccact

SEQ ID NO: 36855 - DNA, 378 bp, Glycine max
  unsure at all n locations
atgatcagccgttgaggtgcttcacctttggggacttccagctatcacctatggtagaagaatttgaagagatcataggatgccctctanggggaaggaaaccatacctcttctcatggttctatccctcgttagctagaatttccaagatagtccaaatctcgcgcgcaggaattataccacagggagcaagtcgaaaatggggtggttggaataccgagaaaatatttggaggcaaaagcaagaatcttggcaggtaaaggcgagcgggtcctgttcatagatattctcgcactgctgatctttgaaggggtcctctttccgaatgtggatgggttggtggacctagcagcaatcgatggttttctcgcctatcat

SEQ ID NO: 36856 - DNA, 289 bp, Glycine max
  unsure at all n locations
cttctgacactagtaccctcggccttatcatacataaaaagttnggactgcacaagtggcactttgtcctaacactcttatatgtgctactcatctttctatctataattacataagctcatatgtatttttatctacgttcaccattcatcattgatgttcgtcactaagcttttttttaatttactgctcaaatattttttttaactttagtctgcaaaaattatttatctaggatatagtgatatcccaacctttgccctgaagaatctactttgaaaaccacctt

SEQ ID NO: 36857 - DNA, 162 bp, Glycine max
ctgctcatatagcacactgtgtctttttgaatcgagctttattcaacattccttggctcttctttgaatcttcaaaccatggataatgattcccccttttatcagtctgaaaatcttaaataattctcgccctaatcctttaccttctaatgccttcacctc

SEQ ID NO: 36858 - DNA, 369 bp, Glycine max
  unsure at all n locations
aactcctaaacaatccaaaaatgttggcttctggtattatgtcaatacatcaaaatcttgtgttacttgtgtcatcatgtaatgtttcctctactactaattcgataaaaccaaataaaaaaaaactaanaaatgaaacctaatatcatcaacaacatacaccaaaatttctagtattagtatcaccaaaatttttggctgctggttttgtgcacattccccacatttgatcttcgatgatccaatctacaaatctcccccccaccccccataaaaatgaataaaataaagaaaataacagaaactttacaaaccatttcagaaagaaaaaaagcgcttaatttaaaatccaattgaaaaattaaatat

SEQ ID NO: 36859 - DNA, 360 bp, Glycine max
aaacacctctccgtcgaaatgatttccccatgtcggatacctaaagggatcaatacttgtatatccttctttccacaattggaccatatttatagcttctgacgaatgttcttgatgtttgctaatgtttcaattatgttaggatttacgtagacctaatgtaacccaattccaattgtaatactgaaccgatacttatgtcgtctccgaagggaatagtgcaaggatgaatattcaaattaaaaccttttggataaaaatattaccgtggattcatatgttaaaatacctagaactaacactaatcttaaccacaaataaaatatatattttgctagagattaatgtgcctgaaattta

SEQ ID NO: 36860 - DNA, 398 bp, Glycine max
  unsure at all n locations
ctacatgttnataaaaggaaccgcgggtgtttatataagaatgataaacgctctaccangaggatactatgtcaatggaaccacgaccaaagtaaagaaaattatagaagatgtagcagttagtgaacgagaccatgattgcaaccgcacctcgccaaagggcattcacaaagaagacattgaagatgaatccttcaaacaacaaacacaaatgaaatctatgatggaggctatgatggagaatgtaaccaaaagcatattataaaaatgtaatcattgatattgccaaagaaatcgattctctcatgtgaagagtgtggaggtaaccaccataccttctactatatgaagaatagtaccttagaagccaaattcatgagaaaatgcgctacataatt

SEQ ID NO: 36861 - DNA, 438 bp, Glycine max
tcaagtcactcccgcattgtatgtctagcattctttgtatgttggtctcgccctttgtcacggggaggcggaatgtccatatcaccttcttaatcgtacacatggtgcactgcgcccccatatgcacaagtaataagagataattctccgggctctcgtgtccgctaaatgcattcatatcatgcaccacataagcatctcttcataacatcataatggacatatcctgcatttgtccgctatcatattccagcctcacattgtgcatgagtcatggcatcatcatgcatatgcgttcaacaaactttttgatctgcaacattgcataccattagttttcatggtggctcatccttgcgttttcctctacagaacactaacaaatgagggggaagcgtgaaacttccactacattcttagttcatgtgtaggcaccac

SEQ ID NO: 36862 - DNA, 379 bp, Glycine max
gttcagccccttacgcacttgtgtggctctggatattgctgagaacaactatttccgtgaagaatatccaagccgaggcgcttctctaacgtttccgtaacgtttccgtgagtaattacgcgaagattctcggccattcttcaagattcatcgttcgttcttcgttttcttcagtcttcaacgggtaagtacctcaaaccaagcttttcaattcattttatgtacccgtggtggtccacatttcgtttcatgtatttctattctctttttcatttactttttatacccccttttgacgtgcttaagccaattatttaagtcatttctcgctgactctatgaataaaataaatttccaccgatcgtttgaattgtatcat

SEQ ID NO: 36863 - DNA, 411 bp, Glycine max
gagatgaggaagtgtagaaaggtgaaacttgctgcttttattcgttgaccacagagtggtacctggagatatgtcgcggtggtcaagagaccttgcggacgtcaggtggggtgctattgcccaaaaccaagcttgaccaatcccgacccaacccgggcatagtcagtcagtgagaacctgtgatgtacctaaacaggcgagctcctagcagtcaacagataataggaacaaagaccactaagcaaggaggcttgtggtggctggccagctgtgaactttgattgatatgtgggttatgacctctggtaatcgaataccaagggtgggtaatcaattacaaggcttataaatgaagacaggagactaagatggtctctggtaatcgattaccacagggtgtaatcgattacc

SEQ ID NO: 36864 - DNA, 314 bp, Glycine max
tcattgatcgtctcgatatatacggttctattttacatctgaggaaaaaagctatggtggtttgaatttgctgagagctccaacattcaattttgagcgtctcgatgtattactggacttaatcagacatccgagttaatagttattgctgtttgaatttgctgagagcttcagcattcaatttcgagcgtctcgatattttacgggactcaatcaaacatccgagcttaaagttattgttgttggaatttgctgagagcttcaacattcaatttcgagcgtctcgatattttacgggactcaatcatacatcc

SEQ ID NO: 36865 - DNA, 258 bp, Glycine max
cttctctagtcttcaccatatcatatacttctttggcggtccaggtcccaccctcatatctacttcactccacagaagccgcaaacctacctgtcaaagggaccctaacttctatggcgagcatggtgtctatgccctatgatagtcggtgaagatgtcatgatgagacacatacatctgcctaaatatagggacctatgaccggcattacgaccatacagatgctggataccctctcccaaatggtatcgggcatac

SEQ ID NO: 36866 - DNA, 413 bp, Glycine max
cgccaaacctagaaatatagacgatgtcatgtcatgtaatttaagacattaaattctcctgtgagcggcggagaagctataaaattaacaagcactctaaagaaatatccttaaacaacactgaagattatggatgattctgattaggcaaagattatagatggttctgatgccatcaagttgataggggttatcataatctattcagtttatgaaatattgaagcacatacaaattgtatgacctattttttttcattatttagctaggtttgtctcttatcattaattaactatggacaatctgattatatctgattgcggtgtcacaaatatgggccaagaaatcatcggtgaatcttctcaccacctgtgttgaattgtataattgtgaacactggattactatactag

SEQ ID NO: 36867 - DNA, 385 bp, Glycine max
acaatgcacgcataaacccaccatcccctgttgcccacctccaactgagctcacgtactcccacgtagcccatatcctcgtttctctcaacaccgggtccccatcaatcctcccaagcttccacaacatccaagaaaaacaacattcaaacagcacaagctatcacagccaagcaaaacagagtaaaggcagataactctgctcaacacatcaaccaaaatcacagcttttctcacttaaagaccacagtaacaattccttcgatccaattcgttaaccgttggatcgactccaaaatgttactggaagtctatagtgcataagcctacattgtaaccgttgggatctactagaaaacatccagaactcattctgtactactctt

SEQ ID NO: 36868 - DNA, 537 bp, Glycine max
  unsure at all n locations
cgctgctgggacttgcannnncanncnntttagttatannacccgngcgtgcnggcactccncngtatataagagaggatagaggannctattgcanttggcacaaacctacacacanngcccgaggaggaattgtctaaaacactcgcggcacctcactcaggatcgagaaggacgcatataccccttgcgtgtgacctgccaattcctattacatccacagtttgctacacacaccgcgtcaatggtcattaactgatcgcaataacgcaatctctcttccttcacccaccaccccacttaatccactaaagggtgcgtccctatcatcaactctcaatagtctcgtctacgcgtactgttcaattgacacacactcaccttgtactcaaaccaaaatcaccacccatgcaatggattttgcaccgagaaaacccgtacaatcaccccaattcagaggctatgctgactggctccatatctctgataattgaagtgaccataccccgccaagttcacaccctcatttcttgaaag

SEQ ID NO: 36869 - DNA, 336 bp, Glycine max
gtatattaacatacaacttctcttgtaaacaacatcatacatcattccacatcatctagccattcaatgactgaagaaagactcttaaactttgaatacctatcacatatttggccagaggaacaccatatgcaagcgtaattaagaggccacctcgtaattacatttgataacgtattattagagttgtctgagaggcacatggaagtcaagtcaatcttgccatgatgagatcaatatcacttggtgacagaggacttacctctaccccaaacaaaagtcactactcttaagtctatccaggggtgaagaaacgaagaacctctctttttacag

SEQ ID NO: 36870 - DNA, 153 bp, Glycine max
ttggagagctatctgttgcatgtgatgatcctagggcatttcttcttttgaagaattatatacatgagacacaatcatgggagcaatttgttgcatctgtgagaatgaatttgttattctttctggaagctggatgcatttttggtcttgggg

SEQ ID NO: 36871 - DNA, 188 bp, Glycine max
ggaagatcattaatccatcgctgatccattcataatgtactacaaaaatctaatccatacagaactatattttataaaaaacaagggcccaactccatccattaaatataatcctcctaaaacgaaaaggaatatctatacacattaatacacccaaacaccataaaatcctatattcgcctcataaa

SEQ ID NO: 36872 - DNA, 504 bp, Glycine max
  unsure at all n locations
agatgtggtgcnttgatcgccgcaccantttgtatataaccgcctgcatgtgggtggacgctaaatgatgtgagaggtacagatctatttttatgccctacaatagagtcgccaggacgtgtgcgtgttatgtgacatacaacgacctatccgcatactgcttgtaattcatcctttatatgagacgcatagaactgaccttcttcacacatatggtgtcaatacacattgatgaaatctaatgatggccattatcttctatccgcaccttatatgagagagagctctgattggtaaaaacagctcttaactcatttgatatgtaaataccagctgatatagtgaactgcccatgataccatatctgtatccgtttatgttaggtaaatatctattcctcacaagacatcattgaggcatacttgttgctggctgctgaatcacttaggcgctgtacaaaggacccataaaatccgaatttttggtgttttaaccataagctct

SEQ ID NO: 36873 - DNA, 312 bp, Glycine max
  unsure at all n locations
tgtgtaacccaccattattagatgagtgataatctctttcttcgtcattagaggtgtcacttgagcggcgtgtctctccaccttcgcgcgcattctttgaaagattcgtgcccctttttgcacatgttctgtagatgcatcctttccggagccatatcataattgtactgatactgcctaacaaaagcaaccattatgtccttccaagaatgaactcgggaatgttccaagttagtgtaccangtaacagctaccccggaaagacattcttggaaaaattgatcagcagtgcctcatcttttgctatgcccc

SEQ ID NO: 36874 - DNA, 363 bp, Glycine max
atcttattgagagtgattctcctacattcttgagtgattcaagaacaccttgcctgtatcaaaggactttcacaacctttgtgtgttgccctcactggaaagagtgatactttccttcctttcatgatcacccttgttctttcaaaccacaattccagaaaatccacctctgcccagaattatctcgtggccataactcccattttacgcactcaaaataagtgattcttgaacctaaattgaatttcaaaacgagacctttcacctcggttcggaatcacctcatttggaaccctgtaccttcattattgccatttctatattcttggccagccaccacttaacctatcgtttaccatccca

SEQ ID NO: 36875 - DNA, 368 bp, Glycine max
ttcttatccaaggctcatctaggaggagaagctccttcttcctatgcttattccctagtggatggcgcgtcctgtcacctattctcctttgccttccgctgcatctccatgggggaaaatcaccattaatggacctcatagaagctcaaagatccagcctccatagaagccccacaatcaagcttccatcacaaagtcctgtgatcaatgtgggaaatcccagggccccgttggacttatccagatccaaaaggtgcctggtcagtgccatacctgcaaatagataaatggcatcaccaaacaactgagccacgcgaatgctcatccaggtcaagacggcgtacaccaactgacacttttacaggggg

SEQ ID NO: 36876 - DNA, 385 bp, Glycine max
  unsure at all n locations
gggggatcaacaaacatagttggtgaacgctgaattgatgaccttgaaagaagaatccattntgttgctcgttattgatatggcctcattaaacatcttttaagtctgatgaagaagtatgtaagtctgatgggccccttagtatgctgaaatatcttcctttgctccagacttgcaatcatagcctcatagataaacactttagtactccatatgcttcctccattcttctaagtttgaattcatgcatgacattaggctgtgcaacatcgatcatttgttcatcaactttaaacactagctatggataagaacattttgcactaggatctgtttcaacaatatcatcttcttggtctctaaagtatgctncaataacatattg

SEQ ID NO: 36877 - DNA, 357 bp, Glycine max
  unsure at all n locations
ccctagggaatgaggggaatctatatggctgagtgtaactgaaattgttggcaaccaaaagtcacccccaacagccaacaagtcagccaccatttggtctcccaaaaggctgatgcctatgttgccaattgtgcccttattacaacttgaactaaagcccttttagttgattaacccanaacatatttttggtcagccaactttacaaggattgggccattatttagacaaactaaacactctaaaattgaaataaagtggtgtcatttagtcctccatttgggccatgatacaactcacaaccttggacttttctccttgaaacttgggcttgtattcaaatagtatggacagcac

SEQ ID NO: 36878 - DNA, 398 bp, Glycine max
  unsure at all n locations
tatagattgttagttagtntggggatgagttactactactagggtttggaatgcagctagtcttgcttccaaagctgtgtcaaaatattgccttattttgttgagttgttgtgtggaagcatctactttcttccttcactgttgttttgtactcctttcttccttcacaactttagtagcttctattgctgattgcttagattccctaacactgttgagcttctttctcagttcctgaagtctcattttggccttattgttttggattccctaagtcattatagttaatcttgtttgaaaaccaagtaacttctcttacccatttgtgctactatgattatgtttaaaaaatatagtcattcattgctcctatgtattagacacttagtttcaatttt

SEQ ID NO: 36879 - DNA, 363 bp, Glycine max
  unsure at all n locations
gtcgtcattgaaacgcccttggataancggggtcttccncagcctaggagacacttttttttaatctgactggacctgggggattattaagataatgtccattgggtttgtgttaaaaatttaatgataggctaacatacccacgtctgatcaccgataaacctggtgtcatcttttatgtcttgttgcgtttttaaacttatttacagctggacttcaacccattgatgtataactttaaagtttctccataattttcatagaacaccctctcttatgctaaagacaatattgtctctccctcttcccagcctatgcactcttctttcctatgaatgttatatccttaggctccttgggacg

SEQ ID NO: 36880 - DNA, 251 bp, Glycine max
accctgctggactgcattctgtcgggaaatttccaccacccactatatctttagtcagccaataacatactttctcctttcccaccaccgagatatccacataggccatccctagatctaccacaaagtctgtttaccgcacttcctatgacgaacaccacctgtatcacaaacccaaaacaccaacccttatgtgcaatttgcagcgagaaagcctgtagaattaaccccaattccagtgtctatgctga

SEQ ID NO: 36881 - DNA, 193 bp, Glycine max
ttactatatgtacccacccgccacaagaaacacaatagtcacaagctatgcgaggctttttataacaatataggcatatctacatgctaacaacttagagaccaatactccaaaatataggccactataaacataatcttatgactatcagcgcaaagctggaggacccaagagaagaatgtagagggtctac

SEQ ID NO: 36882 - DNA, 523 bp, Glycine max
  unsure at all n locations
cgcgtccgggngnggggaggatgttcattccttgtatnacccccccnnttgatgnancnancgangccncncnngcncancagcnaaggaggcgaggagaantttttttaattatnccgccaccaccnaaccgaggggggtttttatttgatggcagacgctccacttctggtgtggccggctggatagcggtagatagagatggtctctcagcctgtacctcataaaagacagacacgattatgtgcacttcctaacacatggctacttctatctgaccgcataaaatcaatctcacgaggcaatacatcaccacacatgtaatcaatatgatatgcatattcactctccgcatcaaatccagacatatgatcaagtacagatgcgcattcaatgcatgaagagtgacagacatgccaattagactgaagattagtcttgtgttcatcaaccacatggtccattatttccacacgaaatactagaagaatctccgtgggtgtccttaccacccgatattaan

SEQ ID NO: 36883 - DNA, 440 bp, Glycine max
agaggatgcttcaatgacgaaagagaaggagattgtttatcacgaaattgaaggaataaaagagggagagatgtggaactttgaagtgcgtctcataagactttcattcatcaaagttacaacaagtgttacacatgcatctatttatagactaggtagcttccttgagaagctctcttgagaaaacttcctttagaagcttccttaagaaaactttcttgagaagctagagcttagctaaacacacccatctaaaaactaagctcacctccttgagaagcttccttgagaagctagagcttagctacacacacccctctaataactaaactcacctccttgagaagagaagctagagcttacctacacacccctataatagctaagcgcacacccatgacaaaatacatgacaatacataaaaacatgtccctactact

SEQ ID NO: 36884 - DNA, 434 bp, Glycine max
  unsure at all n locations
catgcaacgtaatgcatgcagggtcaccagntagttataacggcttaagaccattattctgttattggagttaattacaggccataatggtgcaataccattgtataaaaggagatcatattcatgaataaagcagagaaaaccattttccagtaatagtttagcgtagatatccttctcttacctctcgctcatatcaatcttggaatggtataattaagatcagttatgcgccggctgtgcggtgcatctcccattgataaattaagtttcttctccagggactccccccacaaaaatatagaacaaaaaacaacatacgacattgccaataaagtgagtaaaatttgtgcacgccaagcattccacagccacagtgacgacgccatatatattccgagtgaaacctgatattctaatcgtatcgtgcttac

SEQ ID NO: 36885 - DNA, 479 bp, Glycine max
  unsure at all n locations
gatgttgtcttcgtagcaccntttgaataaaaacngccgctgtaacgnnatgatagtgagagccttttttttctcagcacacgaccgggggctgtttttagatagccctctcctctagtgtagaaaattatcgtctccgactccatcatgatgtgagattaacctgcattactctactatccaactgcgtaagtacgtttgctagttatgtgacaccatcataactcgtattatgtacgcttgcttgagtagccaacttgatgcgaacagatctatttttcatcatactgtctgattagtcgatacttgtgcatgcctttcttttcaaataaaattcatatgctaatggaaagctctctctccgatgattacctctgatttgaattaagtcatggcttcacgtaaatattatttctattgttgatgtatgtctggaataccttattaccagtatctgatgagtatattgtatgtntctc

SEQ ID NO: 36886 - DNA, 135 bp, Glycine max
  unsure at all n locations
gtnggggttacctgaccgagaaaaattaaaaaggtaaagcccagaagaaaagaacagaaaaagaaaaccggaaaaaaaggagaggaaaaggaaatgaaaggaagaaggcaaaaagcaggaaaaaagaaagaaaaa

SEQ ID NO: 36887 - DNA, 176 bp, Glycine max
gtgcttccctttaccctgacggtaagattttaacaccggggaaaccagccctgacagttgattaaaaagcagtattatcttctgcaaacaccccgaaatatcccataagcagaacgtaatttttcctacaaatatccaatttactagcactaaaagcttctagaaagtctgatcgg

SEQ ID NO: 36888 - DNA, 229 bp, Glycine max
caccaaggagttaaaaagaatagatcacccaagaaaaagcccaaaaaacagccgccggaaaaaacccacccatgcgcggcccaaaccaagtttatcaagccaaaagggcaaaaaaggcgaaaaaaggaaaaatatgtcaccgaacaacccgccagcaccaaaaggaaggcactcacaaaagcacaatttagctcggccaactgatgcgaacaacagcagaaaacacacc

SEQ ID NO: 36889 - DNA, 345 bp, Glycine max
atgtggcaacaaccatcactcataaagttggataaatgctcaatcaatcatgctccacattatgcaatttcacatctgacagtgaaggaattattgatccctatgaccagataatgagactacaatttcatctcagctctggcaccgcaacaggttgttgatcaaatccttcaaataccattgacaaatgagtttgaggatagaaggatctatagatatactaaagatggttgctacaatgtcaagagtggatatagactctttgtgaattattttaagggcattaattataatgtttttgattgtcgacgtctcatacttgtactggaatatccagatgaatca

SEQ ID NO: 36890 - DNA, 384 bp, Glycine max
actatcgctccagtgctagtgtttcctatcccgagaaaaccctttgaggtgtattgtgatggatcaaagatgggtttaggaggagtattgatgcaaaatggccaagtagtggcctatgcttctagacaactcaagactcatgagaggaattatcccacccatgatctggagttggctgctgtagttttttccctttagatgtggaggcattacctgtttggctctaagtttgaggtgtttagtgatcataagatccttaagtactcgtttagtctgaaaaagttgaacatgcatcaaaggagatggttaaagtttcttaaagattatgattttgagcttagctaccatctcaacaaagccaatgtagtggctgacgccttgagt

SEQ ID NO: 36891 - DNA, 392 bp, Glycine max
  unsure at all n locations
cttggcatttaatagttttaagcgtaaaagttagtttaaattctgtttgaaattatcaatcgtacatgttctctcaacaatgcttcatttcagaacttaattcaggctaacattagttccctgtgttcgatactcggattcatccgttttaatttttaaatacttgacgatccagtgcgctttccggcaaaccgaatttcccttgaatatatgtgaacgaagaaaaagtggaacaaaaagtaactgtaggggaaatccaacaactactgtaggagacatgtttntctcttttcatttctttcattattttttttctttcttcctctcttattgtttctctttcatcttgacttatttcttgcacctcttttttaccctctttcttttctctc

SEQ ID NO: 36892 - DNA, 293 bp, Glycine max
gggggggggttgaattaagatatccccaactgtttcccctaattaaaaatctattccactttttactcaagttatgaatccccttaatgacaatcttcttaaatattaattcgagcaaagcaacttgattatgaatataaagcaataatatataaaggagattaagggaagagaaaatgcaaactcagttttatactggttcggccacacccttgtgcctacgttcagtccccaagcaatccgcttgagagttccactatcttggtaattccttttacaaggtcttaacacac

SEQ ID NO: 36893 - DNA, 394 bp, Glycine max
  unsure at all n locations
aatgaagaacgnccaaaaacnagttagttctttgcgaaattcctcacccacaacctcacggaaacgtttcggaagcgcctcggcttagattttcttcacggaaacaatttttccaagcaaattcgaaagagagagaagtgcctaaggggctgaaccccttccttcttgccttcctcccctatttatagcaaaataggggaggtggttgccgcccaggcgagctcagctcgcccaggcgagcatggttgcttcctccagaagcaaccgccttctggaggaatattccggagggcccatgtgggcctgggtgctatttgcaccctcattgttactaagtacaccccatctgctgtttgttggtgatgcttttttcgtaaagttaccggaacttacg

SEQ ID NO: 36894 - DNA, 404 bp, Glycine max
tcttgacatcatcaaaatcttcgaggaggtacattctgcccctttgtgatgatgacaaccacctgtaggttacgagcaacaacaaagaaaatatctatttgcatatagtttactcccccttggttttacaatgatttcttatatgagacaatagaagatttcatatttttcatatataaaaagttgtctcataaaaaataaatcatctcatcttattaacttatcttttatctttctctccccctttgtcaacatataaaacaaatcatgaatagagaggagaaagatgttaccacttgttgtaatgtatgagaatcaagagataccaaaaggcgttataccaatcattcaatattaatcaggcagaaacaagtacaatatcacatctatcgaacacagtctta

SEQ ID NO: 36895 - DNA, 377 bp, Glycine max
ctatatccttatctactcacagggcgctattaactaaattaatctccttgaaaataatattacggataaaaataacacaacagatataatcaaacatcaaatataattactaataatatgtagatatatatcagggtgttacactcccttccttcctaattataatatcctttttagaaattggttcgcccctctttatatgattttattctaatcgctagacactaattattatttctacatactcttaggtgattattctctctccaaacattaatgataatgcattatgtggatacagagataagaaaatgataattttgaataataataaaataattgacatatctaatgtttaaaataatgaatgaattatt

SEQ ID NO: 36896 - DNA, 295 bp, Glycine max
  unsure at all n locations
tgaccacagagtggnacctgcagatgggtcgttggggtcaggacacctcggcggcatcaagcggagtgctattgcccacaaccaatcttgaccaatcctgactcatcccgggcatagtcagtcgttgagaacctgcgatgtacctaagcatgcacgctcttggctggccacatataagcggatacccgaccacaatgcatggacgcttgtgtagtggctggccaactaggagtctagtgtgatatctgtgtgatggcctctggaaatccagtaccatagatggttaatccattac

SEQ ID NO: 36897 - DNA, 263 bp, Glycine max
  unsure at all n locations
ggcttctgtgancttatagccgccgaaccaagagagggagttttatttaaccacaccgggtgactatactccaaaaaacgtaaaaaccacaattcgctaacgatctagaataataagataggggaacacagagtgcataagaaggctgttagtcaatcacttggtgcaagttataccagtgaccatctgggccaaatcagcctgcaacaccaatagcaggaacgtggaagctccgcgcagtagcaggtgtaccccctaggggc

SEQ ID NO: 36898 - DNA, 402 bp, Glycine max
ttctttcacaatcaatctgtctagtgactaaccattctattataagttcacactcttgttctttcgttgttgaacatgcacatttgctcaaattcatgaaaggaaacacacatttcatcataagcatctattcaatctaaaacaaggcatacaaccattttcccaaaataaataaactacttcactgccataccatcaaaagttaagttaaactgttcacgatgcttcaagatgagcaaatatacaactcatgcacaagactaacaaaaagtaactgatgtactaacatcaaagttatactaataattcaaaaagcacaggatataatcgacagaaatttacaagtcttgtgatcaggcctaggtgtactatgtctgaacctcctcctcgtcagtcaaatgc

SEQ ID NO: 36899 - DNA, 397 bp, Glycine max
tgtaattcttcttctaagtggagtgtggttctaattatggtttctatacgcttaaagtaaaaaggactaaaagagaaaacattaaaatattaaaggatgtcagctttctaagacggttattacatcagaatcgtctaagaaagcagggtctgacaaactttctaagactattttgatgtaataaccgccttagaatgtttattcttctaagacggttctattataaccgactttgaatgtcagttttttaagacggttattatatcagaaccgtcttagagagtttgtattttagatgatggtgttttttggaaccatcattaattgatattcacttttaacaacattgattataatgacaattgaaaatcgtcgttaaaggccaatttaaccgtcg

SEQ ID NO: 36900 - DNA, 401 bp, Glycine max
  unsure at all n locations
caaacattaaaagggagaaggtaatattgtagccgatgctctttctcggcttcatgcattactttctatgcttgaaacaaaattgattggtcttgaatgtttgaaaagcatgtatgaaaatgatgaaacttttagagaaatttttaaaaattgtgaaaaattttcagaaaatggtttctttagacatgaaggctttcttttcaaagaaaacaaattgtgtgtgcctaaatgttctactagaaattttcttgtttgtgaagcacatgaaggaggtttaatggggcattttgggatccaaaagactctagaaacattacaagaacatttttattggcctcatatganaaaggatgtccacaaattttgtgaacattgcattgtatgtaaaaaggcaaagtcta

SEQ ID NO: 36901 - DNA, 264 bp, Glycine max
tgttggcagtgtgcagtctaattgctatttgaaaatcaagttgcggggcgttaaattattccaagtaccggtgtgcaagcactgaaggtattcatgcatagaaataattatatcatgacctttgatgctcacaacacatgatcaaacaatgcagactgggtttgcacttggttctaattaatgaactgggctatctgaaattgttttaagaaaggaacagagatacacttctaatttgctggcagaatataattggagtgcctc

SEQ ID NO: 36902 - DNA, 459 bp, Glycine max
  unsure at all n locations
gtgtgtctctgaaagcaccttttggacaacngcggggggananganggtctagaagggagncccgttttttacgcgccacgcaacncggggaggtgtgttaaattgttgcccctccccacnatccaaccatgacgactgatgaaagtgcaatcataaagacctggtgtccttgtctgtgacaagacgagcttaggttctcattatataggattgggcccgaccttacgatatcaaagaaacctctggatggcatagtatcagagaatctctctctatatcaacctagggagtggcgaaaagatgaaagatggggatcatagactgtgtgatccccagatcctgagaaatatgaaactctgaggcgaataacatatgatagaccccactagagatagtccgccggcaactgttactagtggatatcttatnttcgaagaatcacaggtgtggatgaaaag

SEQ ID NO: 36903 - DNA, 393 bp, Glycine max
  unsure at all n locations
accatgaaatngatggcgatgatgataacttatacgagtttcttgacgggatgtttccgtgatcttggctgatttgattgtggtaacacaaggattcatcaaaaaagttcataaaaactcctattgagttcttgtattagagatactctaaaattaaactaagctaaaataaaaatgtagtatttaacttaaactttttttatattaaattctcaaattaagtaatgccacattatatcttttttacatttacaggaacaagttgatatgagatctatttagaacaagttgtagaatttcaagagaacattcacaaacatatatatttgatatgagatcttaatgacaagaataaaagcaactaattaaagtaaaatttgtctcttaaaaata

SEQ ID NO: 36904 - DNA, 372 bp, Glycine max
attttatcaaaaaaggaccaacgatcgaaaagaaggaacacataaaaataagttctaaaaattgagaaagggtgataatatactgaacattcataaatcatatgtcagaaaggagacgtgccaccaagcgtgaccatatatgtctccactgaaaaaaataaaaacactctaattttcatttttgacatagaattggcccattgataaacatctgtgcaatccaaaaaacaataaacaataaaatgaatacacctaaactcaagaataaaatcagagtaaacatcaatcaaaattcaaattttcaaaggcattatcccggaaccctggctttatgttgcatcaatcagattaaaactacatcatgttgtgttt

SEQ ID NO: 36905 - DNA, 381 bp, Glycine max
  unsure at all n locations
accaaagctntgatggacgaaagggcgggatctcttgcatgaatctccacaccaagaacgatatggattcctctctcccttggctgaactcgtgaaaatgaggaagaaggtcccaaaaatttgcttttaaagaattgtgaagataacgtctaaggcttttgtccaaaagaaattttgattaagcctaattgacaagcttaattgacaccatgattgactaatggccagccatgttgaacgtgctaagtcatgcttccgatgggtattattgcttttgaaatttaaaccacaaatggttaaagtagacataggaaaaaatactgaaaattgctttcttaccaacgctccgaaatcttatcttaaatgtctagattaatgtgc

SEQ ID NO: 36906 - DNA, 483 bp, Glycine max
  unsure at all n locations
agatctacacttgatacgnctcttgttannacngacgggtcanccaancctactgaagacgaaaatagttcggttttaagacaacaaccnccccctgtgggtgtttatgtacgaaagaccacacaccatacaagtaagggtaacatcttactctccacatagaaggtggacctaacgaaataatgtgcttgtgtggtctctcaaaagatgcataactaaagccattgtgcgctatgcattgataagaggctttcacccatctttttacatgttcatgctcatgaagatggaacatcatactcccatgacctatgcttatataagtgtgggggcaattaggtctacatacgaatagaactcctcctatgcacaaatgggacaatgagacgaacaccccccttaagacagttaagagaaaatagatggtgagagtaaactccgaaatgaataatcgctggcctattattaatactatgaataatn

SEQ ID NO: 36907 - DNA, 438 bp, Glycine max
  unsure at all n locations
gagaatggacttcagaagtgtttcanaagttacaaactacttcaaggaaaacatgaaggaggtatagataattctttaaaaatttccattcaatcatgtgatgactttgaaagtctaaaattaaagacaacaaagctttgtcttgaaaatgaggatatttgtaaataaagatatagtatattggaagaccttcagaagttgaaaaatcaactggaaggcttacaaaatgagtatatcacactcaataaacttcatgattgcctaaatgaggaaagatgtaatctattgaaagcatgttcccaagtccataagaattatgaaaacttggaggcaagtaaacatatgatgtagctccaagtagagcttgtaagccttggatctttttcatcaatggagtattttgcttcttgaagagatcaatggcagtggaatgaaaaa

SEQ ID NO: 36908 - DNA, 393 bp, Glycine max
  unsure at all n locations
cttaaatgtnggaagtacacgcgtggtctattgataagatcaaagaccagcacaaggatctgcaagatatggaatctactttgaaggagctattggtattgttgttggattctttgattctgttttaagattcataggatattgtaccttaattgttgagtttctcacgaccaaggttcagctcgattaatggaactgaaaagtcttcacgaggaaagaataagaatattacagcagttgtgtgatctacaggtatttttttcccttaatactatgtacaccagtattttaactagtatttctttcctacaatgcatgtatgtgtattttctttttgcttttataaggcttgatgttcatgattggatcataacactttgaagaatttgaagt

SEQ ID NO: 36909 - DNA, 380 bp, Glycine max
  unsure at all n locations
gccttctggaggaatcttctggagggcccatgtgggcctggttgctatccacacccccctttttactaaatgcaccccccttttctatttttttgtaattctttctccgtaacgttacgaaactttacgaatttcgtaacaatacttattttccttccgcaaggttacgaatacttacggattatgtattcactcttttttagctttcgaagaaattacagaaacttacggattgcgcaaaaacacctcttttcgacttccgccacattacagaatttcacggatcgcgcaagcctgcttcctttagatntctgagacgtctcaggacttcatttattgtgcaacaaaggacgccaagtatctcaaagtggctaaccaaa

SEQ ID NO: 36910 - DNA, 288 bp, Glycine max
gactatatatgacaatatgggtaggagccgccggctactcactcaacaacataaagaaaatagcacattattaatataaattcagtttgagctggacattcttggtcacatcaatttcttattggttgctgtaatgtcatacactcaaacaagttgagagaaatgacgtaatgacttcttaattatttaattctaaaagcaaccgaaggtacctaaacgaatcaaatcactttcatcggataaatgtatatgaaattcacattaatgtgacaggcagcttgttaaaat

SEQ ID NO: 36911 - DNA, 364 bp, Glycine max
gacactatgatacattgagcctcctcataggtgtatggttcatcttcaaaactgataatagacgagagaggtctctgaaattttgctctatcacaacatcaaagttgtccaagactgaagaattgaatttggcaaatgacaaatgacgagtcttagtattgatctttgtttctttcccaagttcttctgatctaaaataaaaatctccaccgagtgatctggctagatcatgcatgaggtcatgcatcacaaaacatttgccataaggccaactacttctatttgtacttgaacgttggaaaaatgatctcgatatcgaatcatcaatatactcatgaccaacctcttctaaagtcctaccatt

SEQ ID NO: 36912 - DNA, 397 bp, Glycine max
  unsure at all n locations
gctcgcgtcgccgtcggtacgatgcgtaggttgcgacactagganacttgagattttaacaaaaagacttggtaagttgccaactaaactgtctgttggtcaacctacacattctttttgtttgcaggttacaggttgtatcatctatggtgaggctcatgaaacacgccaatgtattcccattgaagaaaacacttaacaagttcactatatgcgaaatcaacagagacaaggatatactcaaggaggattctcatgcttctagcagggtccttataaccaacaaggacagtggagatcacaccctgacaatctattctacaaggaccagggtggaccttccaacaggcccattcaacaagggcctaacatctttcagaggactactaagttggag

SEQ ID NO: 36913 - DNA, 396 bp, Glycine max
  unsure at all n locations
aaccttcaccaagaataaagccggggctattgtgcaagcaatcaatggggcaaaacacaccaaatgattatgatgatagatggctcaaattctcacanaggtaaacttatcactttcaaattgagctttcaaaactatcatgacatgtaaaggaaaaacaaggatttcaagtcacaaaatgtcaagagacttttattctcagaacaattacccattacttgaacatatcctataattcaaagacaaacatgcaaatttaatgcaacaaaactaacaaaattaaactagaacccaacaaaactaacaaaattaatctaatttaacacaactaacaaaaccgaaaccaaagaacactccccccccatacttaaacaacacattgtcctcaatgtagca

SEQ ID NO: 36914 - DNA, 381 bp, Glycine max
ctccccaacaacaaaactggagggaggagtatgatcacatactgcccctcgacacacaacaacaataacataccttattcattcaacatgtaacttcacacacaacacgactaacataccttcgtcattcaacatgtcacatagaccatgaaaaaccaagaaatcagttgaacaatcgtgtgactctaaacgataaaaaacaacaaaagccatcctaatatccgagaaagcaaacaaaatacccattctctgaggtgacaaaccatatccacaaaaattacacctcaatatagagaatcccagataaaaaaactactctgaatcggtagacaccatcagaccctagacataacaaccgagacctaaacactatacatgtat

SEQ ID NO: 36915 - DNA, 362 bp, Glycine max
ccctctcattcacatgtcccaaccttctgagtcatattttagtctttgacaacctgttgacatagactgcagcaactgatcccatgagcaatcctgcaattagagaatacatgccattcttttgtatccctctcatgaatatcaaagagccatttagaactccattctcccctttgaacacataaccttgtttgtcaaaatcactcagagaaatcaaatttctcttcaaatctaagacaagccttacattcttgatgactctctcaacaccatcatgaagcttaaacctcacagacccaactcaagtgatcttacaggacttgttgattccaagtaggattgaaccaccaacttgttcatca

SEQ ID NO: 36916 - DNA, 339 bp, Glycine max
  unsure at all n locations
tgatccatggccaccttgggttaccaagttatccaatgcattcagtttgccttcaagcgttttattctcagatgatgcagatgggtttgttncttcctcatgcgctcctctagtgactattgcatcatttgtggcgctaaactggtgggagttggaagccatcttctcaattaaatttctggcttcagcaagagtcatgtctccaagggctccaccactgccaacatctatcatacttctctccatattactgagtacttcataaacatattggagataaaactgttctgaaatctgatggtggggccacctggcacatattttcttatactgggggga

SEQ ID NO: 36917 - DNA, 389 bp, Glycine max
atatggctatgaatcttagcgggttattatttatcaaaaaaggacgaaagatagaaaagaaggaacacataaaaataagttctaaaaattgagaaagggtgataatatactgaacattcataaatcatatgtcataaaggagacgtgccaccaagcgtgaccatatatgtctccactgaaaaaaataaaaacactctaattttcatttttgacatagaattggcccattgataaacatctgtgcaatccaaaaaacaatacacaataaaatgaatacacctaaactcaagaataaaatcagagtaaacatcaatctaaattcaaattttcaaacgcattatccctggaccttggctctatgtttgcataactcagattaaaactacatc

SEQ ID NO: 36918 - DNA, 275 bp, Glycine max
tgcaaaacttccgctgctcttccactggtgatgatcaaggaaggctaaatgttgaagaaagggcacaaaatctcatatgccctcaccatggcctaactattgtggtggatttgagaaggggctacgtctaagtgcttaagtagagcacactggaatacaatcaaaggaataaccatacccataactccaaaaagacatttgtacataaaaaagatgggcaaactacctgatactgccctcacgaaagggaaattgtccctcccacaaacctgtat

SEQ ID NO: 36919 - DNA, 412 bp, Glycine max
  unsure at all n locations
caccacccctcactctaagccttataagnngtaangtgttgagtgacaatggtgagtcggtgggggataagcaagtgttacttacattctccatcggaaattatgttgatgaagtgctttgtgatatggttcccatggaagccagacatgtgttgcttgggagaccttggcaatatgatagagatgctgtccacaatagggtcaccaattgatattctttcttgcataaaggtaaaatggtagttctctcacctttgtctccaagtgaggtttgtgaggatcaaataaaaatgagattgaaaagagaaaaagaaaagatattcaaagtaagaaaaagtcctttgagagagaataaccacaaagaagagaaaacataagagtgaaaccaattagttataaagagagtttgtta

SEQ ID NO: 36920 - DNA, 164 bp, Glycine max
  unsure at all n locations
ccaacaaaggcccgcagagacgatggtgaccagcgtgatgctcccctgacatgtgtcacgcatttagtgtgtgaacttcatatgcgaaggccctgtgtggagctgcatgcagtggtgtnttgagttggctgcgcacgtgcacgacatgacgatctttgatgatg

SEQ ID NO: 36921 - DNA, 308 bp, Glycine max
cacttgaagaattgcgacttcgggaaatgcattttttgaaatcaatcactggtaatcgattaccattaacgtgtgatcgattacacaacaacagaggtgattcttcattttgaattgagaaaattaaaacgtttagaagctctggtaatcgattacaagtgttgcgtaatcgattacactattttataatgatttgaaactgttaaacacaaattgtaactcttgataatgtaaatctaaacgtgttaacacactggtaatcccttactaccttctggtaatcgattaccagagagtataactctgtg

SEQ ID NO: 36922 - DNA, 252 bp, Glycine max
cgaatgtgctacgaccctccgccatacacatcgagcgcatcgatttatgataggactcaaccacacttccgagtgaaaagtcttcgtccctccaatttgcatcgaccatcggcatcaaatagcgagcgtcctcatatgctacgggacttgatccgacttccgagtgaaaagacagtgtcacattgaaaatgctacgatcggctatcttcaataacaaaggtctcaatgtattacgggactctatcagactac

SEQ ID NO: 36923 - DNA, 389 bp, Glycine max
  unsure at all n locations
cctctaccggagaataaacattgtcagccagctgttttgtatttanatttgcgcaatgncggctgaagagcatgtgttgtggctgtttaactaccgacgctggctactgtattttctattccacccctgaataatacttggacgatgtcgatttggaaatgtacgatcggagtcatccggtcatgcttctttttaagacctcgatctgtcatcttttcctggccgacgtcggctagcattgttttcgatcaatatctgtgaatcatgcttgttgccacagtgggctaacagtttcatggctgatgaaatgagagcatgccaatgtcggtcgaaacacatcctcgcacgataaaccctatccgacctacattgtaatttttgtaggcaat

SEQ ID NO: 36924 - DNA, 400 bp, Glycine max
  unsure at all n locations
acctccactccttatgctcccatgaacccgggtatagggccctttttcactcacagtgtgtgcaaatagtgttggtgtttgtgtgcatcanatgaataaatatttacttcatgcatacatttaaaatgtactaaaagcaacaaagagtntatatacacaagaacataatgaaaggaaaccaacaaaggggtaagtcacggtaaaacattgcacaaaattaaatggcctaactctctaaaaacattccccagtggagtcgccaactgtcgcaacctacccttcggcgggagggcgacgcgagactcgcgggatgcgtgttccacgaaaggaatacgcgcggagtcgccaccaacgtttatttgaggaaaacgtcggaaaaaccggaaaagacgcgatctac

SEQ ID NO: 36925 - DNA, 372 bp, Glycine max
  unsure at all n locations
gtgtcggtcgttatatggccccgactgatatccttcagccgacattgtgcaatttcttttacaaacgcaggccgataatatttttttacggtagaggaaattttttgttttggtgttgcctaaaagatttacaatgtangtcggcaatgtttttgcgtgcgagctcaattgaggttgtttttcgggcgaaattggcttgttctcatttagtcggtcaagaaaacgttagcccactgcggcaaaaaagaaactttattcacggaaattgatcgaaaaaatgatgactgacgtcggcatgaggagatgcctgatcgaggtttanaaatgatgagaatcttgatagtgtctctgcctctaggccttcatccttct

SEQ ID NO: 36926 - DNA, 199 bp, Glycine max
gtcctttatctcccgctgcatatccatggctgaaaatatcattgaaggacctcatggaagctcatagatccagcctgcatagaagctcctcaagcaggcttccatcacgtggtatcacagtacaaaagctgcaagcatgtgctccttaaacctctattaattgtcagctacacacttctgctacattgcagtttcttca

SEQ ID NO: 36927 - DNA, 472 bp, Glycine max
  unsure at all n locations
agattttaaatttgatancgncctttttgtannnaacngncggcnananganggtattgatagaganagtttttcctaccggcnacccagancgagaggtgtgattgacccaananacccaccccgcggagaggccagcganggagaccaaagcgnccnaaggngaatcnncaccgacacggaaccacacngcacanacgcaggaaacacagaacagncaggacagaagggaaccaagacataagagataacagggacgagcgcnaanacagccagacccgagggcgcgaggcatgcgcaaggagaccggtgattgaacaaagatctaaaatgagacagaggagaaataacacggatggtattatatgaactatgtcataaatacgtccatagaaaattggtatgtatcttagaaaggtgataacatactctcttcgagctatttgagtaaggaatctgagatcatcctgan

SEQ ID NO: 36928 - DNA, 246 bp, Glycine max
taattatcttgaattgcaaaatctgtgtattatttgtgggacagatcttattttcttgcgaattggatgtcaaatcatgtgaagaatcttgtataggtttgcatgtgttttctaacccctcctaggggtgtcgtgtgccattccctatcacgtcacttcctagggcttgctccctcctgaattacacgcacacataaacaaaaggttatattttcttggttaaagcatgcatttccatgttttcac

SEQ ID NO: 36929 - DNA, 249 bp, Glycine max
gaccatgggaacacctctagagcgggggatgttcaatttctagcacccacatatattatgagcctgaatcggacatccgggtgacaagttgtgaccatcataatttctctacaccataccgtgctcaataacgagcgtctcgagagattacgcgcgtgaatccgacgtccgtgtgaaaggtatgaccatctgggtcgttcgagagcttccgttgggcaaaatcaagcggcccgatttattatacacctg

SEQ ID NO: 36930 - DNA, 442 bp, Glycine max
  unsure at all n locations
ataattcaacatcgtcttatagaagtagatcctttgtatttcagttcacatttttttgaggtggagatactttcctttacacctgtcgacaaacaatcattnttgctttctcttttgtttggaaaacggttatttcacactacttttttaatacatattctctttatacttcttaaataaatgtcaaatcgtaacagagaatatcagctgacttcttcaatagatgtataacgaaaagaaacataataattcacgtaagcaagtaaatggaatatgtctccaataaatttatgccatttaacaatcgtttgtatttgtaaaatatatttcgtactgattatcatgtaccttttaatgacacangagagaagcacaacacggaacaaatttgttacgataagtctaccaataaaagacaaatgtctcgcattccaattactta

SEQ ID NO: 36931 - DNA, 449 bp, Glycine max
  unsure at all n locations
gcagatntggtcttcgtcagtgaaaggatcaaagtgggttcattaaaggaaaatttgatcatcctgctgggactattgagaaaactggggcacataaagagggtgagaaagagggagaaacccatgttgtgactgccattcctatacggccaagtttcccaccaacccaacaatgtcattactcagccaataacaaacctccttacccaccacccagttatccacaaaggccatccctaaatcaaccacaaagtctgtctaccgcacttccaatgacgaacatcacctttagcacaatccaaaaacacgcgccaagaaatgagttttgtagcggaaaaaaaacctgtagaattcacccaaattccggtgtcctatgttgacttgctcccatgtccactcgataatgcagtggtagccataaaccctgctaggtttcctcaatctccatt

SEQ ID NO: 36932 - DNA, 417 bp, Glycine max
  unsure at all n locations
tcctcttagtagggaatatatccttcctaagatggtgccttacccagtccccttcattaagaacgagctcatttcttcctctatttcctttagtagcatacacctttggttggttcctaaccctctcatgcaacttctttacaaactctaaccttgattccccttctttatgtataaaagaagtgtcaagtgggaggggaattaggtcttagggtgttagaggattgaacccatagataacctcaaaaggggattgcttggttgttctatgaatccccctgtngtaggaaaattctacataaggaagatactaatcctaagacttatgggttcctttcagaaaagcccttaaaagggtggatagagacccattcactacctttgtttgcccatcaatttatggatgacaagtggtag

SEQ ID NO: 36933 - DNA, 173 bp, Glycine max
tctacccaagggctgagagaccatacaagtttcctaaccacttctaattatgtgggccattaagtctatcatatgctgacaatagccgagaagcccatgaatctcttccggggtggagtaagtgtatgccattgccttggccttggctaacaagcagggaagttcttgactcc

SEQ ID NO: 36934 - DNA, 272 bp, Glycine max
ccaatcatgtggcatattatttggttattttgaagagaaatccactaatctatacctacgtaattccttatgacttgcaaaatcataacctggttgcacaaatagaataacctgtgatttcctgcatacaacccaaacgccttgtaactaactcactaccagtagcatgcccaagaagatttgcttcaatagacattagcatgccatgtatcaattgaacgtgagaaatcatatggcgagggttaatccttaacgcctacatcaatatgcat

SEQ ID NO: 36935 - DNA, 342 bp, Glycine max
  unsure at all n locations
ctaactaaataaactaaacatatttactgctttattaacataaactganaataagaggtgtgtgtagtataaaaataaatgaaactcctgtcaacaatcatcctgagcaacaatatgctcgtcctgagctgacgtatgctggccatgaggtgaacaacgagtatcctgggctggttgaggagtctccaatgtgctgtacgccaaggatcccaagtactctgcgccgcctatatatctgctgcatattcagtgttctcggcgccttcttcaccctcagagacctccacgacaggtaaagtagcatgtgaaacctgtggaatggcctcatgagtaacctctatc

SEQ ID NO: 36936 - DNA, 515 bp, Artificial Sequence
  unsure at all n locations
aggcgttttnccttgataccttcgnaggtccanccttttncttgctgtatcgactcattaacaccaagctcggtgagcactctgaagattatgacaactttcgntgatctttttgtcatcgatattntagnagagaccaatctttcttcttcaaatgtcgctcatgatatttattgtaattatcttcaatgtatgtccaaaaagttaaccttttttggacccccacaatagaaatctttgaaatatttagccatgtgttggcaagccattcatatttctttgcggagaaacatgatctattgtgtctttcggatgcttcttctatgtcttcttcttcttcttcttcttcttcttcttcttcattgaccacaatattatccaactcaacttaggtgcaaaatggtggaatttgagactttgacgcanagtcagatggtgcgtcatgctctttcattacattggacatcatntactaccctttgaagaccctcgatccatggaagggttaattggtg

SEQ ID NO: 36937 - DNA, 22 bp, Artificial Sequence
  :
gtgtctttcggatgcttcttct

SEQ ID NO: 36938 - DNA, 22 bp, Artificial Sequence
  :
caccattttgcacctaagttga
